(19) United States
(12) Patent Application Publication
(10) Pub. No.: US 2023/0383314 A1
(43) Pub. Date: Nov. 30, 2023

(54) Olivetolic Acid Cyclases for Cannabinoid Biosynthesis

(71) Applicant: CB Therapeutics, Inc., Carlsbad, CA (US)

(72) Inventors: Erin Marie Scott, Encinitas, CA (US); Jacob Michael Vogan, San Diego, CA (US); Tyler Huelsman, San Diego, CA (US)

(73) Assignee: CB Therapeutics, Inc., Carlsbad, CA (US)

(21) Appl. No.: 17/827,640

(22) Filed: May 27, 2022

(51) Int. Cl. C12N 15/90; C12N 15/81; C12N 15/52; C12N 9/12

(52) U.S. Cl. CPC C12N 15/905; C12Y 404/01026; C12N 15/81; C12N 15/52; C12N 9/12

(57) ABSTRACT

Provided is an engineered olivetolic acid cyclase (OAC) enzyme derived from a microorganism or non-Cannabis plant, wherein the enzyme catalyzes cyclization of a polyketide (I) into a resorcyclic acid derivative (II), where R₁=CH₃, CH₂CH₃, (CH₂)₂CH₃, (CH₂)₃CH₃, (CH₂)₄CH₃, (CH₂)₅CH₃, or (CH₂)₆CH₃

[chemical structure]

Also provided is nucleic acids encoding the above OAC enzyme, expression cassettes comprising those nucleic acids, and recombinant microorganisms comprising those expression cassettes that express the OAC enzyme encoded therein.

Additionally provided is a method of converting a polyketide (I) into a resorcyclic acid derivative (II) comprising contacting the polyketide with the above-identified OAC enzyme in a manner and for a time sufficient to convert the polyketide (I) into the resorcyclic acid derivative (II).

### RELATED APPLICATIONS

[0001] The present application claims priority to U.S. provisional patent application No. 63/194,121, filed on May 27, 2021, the disclosure and content of which is incorporated herein by reference in its entirety for all purposes.

### SEQUENCE LISTING ON ASCII TEXT

[0002] This patent application file contains a Sequence Listing submitted in computer readable ASCII text format (file name: CBTH-13-US_SeqList.txt, date recorded: May 27, 2022, size: 1,485,254 bytes). The Sequence Listing, which is a part of the present disclosure, includes a computer readable form and a written sequence listing comprising nucleotide and/or amino acid sequences of the present invention. The sequence listing information recorded in computer readable form is identical to the written sequence listing. The content of the Sequence Listing file is incorporated herein by reference in its entirety.

### TECHNICAL FIELD

[0003] The present application generally relates to recombinant enzymes and genes encoding those enzymes. More specifically, the application provides recombinant olivetolic acid cyclase genes and enzymes that function in microorganisms.

### BACKGROUND

[0004] Cannabinoids are a class of organic small molecules of meroterpenoid structures found in the plant genus Cannabis. The small molecules are currently under investigation as therapeutic agents for a wide variety of health issues, including epilepsy, pain, and other neurological problems, and mental health conditions such as depression, PTSD, opioid addiction, and alcoholism (Committee on the Health Effects of Marijuana, 2017).

[0005] While it is known that cannabinoids may be obtained via biosynthesis in plant species, there are many problems associated with the synthesis of such molecules which need to be overcome, including problems with large-scale manufacturing, purification, and heterologous expression for biosynthesis.

[0006] Producing cannabinoids, in recombinant microorganisms such as yeast is a promising solution to the above problems. See, e.g., U.S. patent application Ser. Nos. 16/553,103, 16/553,120, 16/558,973, 17/068,636 and 63/053,539; U.S. Pat. No. 10,435,727; and US Patent Publications 2020/0063170 and 2020/0063171, all incorporated by reference.

[0007] One way to improve biosynthetic cannabinoid production in microorganisms is by the discovery and use of new enzymes that catalyze the same reactions as plant derived enzymes but with improved parameters. The present invention provides such enzymes with olivetolic acid cyclase activity.

[0008] In Cannabis spp., the olivetolic acid cyclase (OAC) enzyme catalyzes the cyclization of the linear polyketide olivetol to form olivetolic acid (OA), a precursor for biosynthesis of downstream cannabinoids such as cannabidiol (CBD) and tetrahydrocannabinol (THC). See FIG. 1. OAC can also form many variants of olivetolic acid, by accepting polyketides with longer or shorter alkyl chains (FIG. 1, R1 group). Examples include varinolic or divariniolic acid, orsellinic acid, phorolic or sphaerophorolic acid. Characterization of the enzyme responsible for this reaction in the Cannabis plant was published (Gagne, 2012) and the enzyme was shown to be a member of the DABB domain protein family. The crystal structure of OAC was published in 2016 (Yang, 2016) and the mechanism of the reaction characterized as a C2-C7 aldol cyclization.

[0009] DABB domains are small alpha/beta barrel motifs of unknown function. They are known to be upregulated in response to salt stress in plants and for purposes of molybdopterin uptake. A description of the domain can be found in the SMART (Simple Modular Architecture Research Tool) database (Letunic I, Khedkar S, Bork P. SMART: recent updates, new developments and status in 2020. Nucleic Acids Res. 2021 Jan. 8; 49(D1):D458-D460). The domain typically forms an alpha-beta barrel dimer.

[0010] There remains a need for new engineered enzymes that are capable of catalyzing the cyclization of the linear polyketide olivetol to form olivetolic acid (OA), which is a precursor for biosynthesis of downstream valuable cannabinoid molecules.

### SUMMARY

[0011] Engineered enzymes from microorganisms with OAC activity are provided herein.

[0012] Provided is an engineered olivetolic acid cyclase (OAC or altOAC or PKSC) enzyme derived from a microorganism or a non-Cannabis plant, wherein the enzyme catalyzes cyclization of a polyketide (I) into a resorcyclic acid derivative (II), where R₁=CH₃, CH₂CH₃, (CH₂)₂CH₃, (CH₂)₃CH₃, (CH₂)₄CH₃, (CH₂)₅CH₃, or (CH₂)₆CH₃

[chemical structure]

[0013] Also provided is engineered nucleic acids encoding the above OAC enzyme, expression cassettes comprising those nucleic acids, and recombinant microorganisms comprising those expression cassettes that express the OAC enzyme encoded therein.

[0014] Additionally provided is a method of converting a polyketide (I) into a resorcyclic acid derivative (II), where R₁=CH₃, CH₂CH₃, (CH₂)₂CH₃, (CH₂)₃CH₃, (CH₂)₄CH₃, (CH₂)₅CH₃, or (CH₂)₆CH₃,

[chemical structure]

the method comprising contacting the polyketide with the above-identified engineered OAC enzyme in a manner and for a time sufficient to convert the polyketide (I) into the resorcyclic acid derivative (II).

[0015] The present teachings also include an engineered olivetolic acid cyclase (OAC or altOAC or PKSC) enzyme derived from a microorganism or a non-Cannabis plant, wherein the enzyme catalyzes cyclization of a polyketide (I) into a resorcyclic acid derivative (II), where R₁=CH₃, CH₂CH₃, (CH₂)₂CH₃, (CH₂)₃CH₃, (CH₂)₄CH₃, (CH₂)₅CH₃, or (CH₂)₆CH₃

[chemical structure]

and wherein the enzyme comprises an amino acid sequence that is at least 95% identical to any one of the sequences set forth in SEQ ID NO: 193-SEQ ID NO: 378. In some preferred embodiments, the enzyme comprises an amino acid sequence that is at least 99% identical to any one of the sequences set forth in SEQ ID NO: 193-SEQ ID NO: 378. In some more preferred embodiments, the enzyme comprises an amino acid sequence that is one of the sequences set forth in SEQ ID NO: 193-SEQ ID NO: 378. In some preferred embodiments, the enzyme comprises an amino acid sequence that is at least 50% identical to the sequence set forth in either SEQ ID NO: 385 or SEQ ID NO: 386. In some embodiments, the enzyme comprises an amino acid sequence that is at least 20% identical to SEQ ID NO: 334.

[0016] The present teachings also include an isolated codon-optimized polynucleotide that encodes the above-identified engineered OAC enzymes, comprising a nucleotide sequence that is at least 50% identical to the sequence set forth in either SEQ ID NO:1, or SEQ ID NO:2, or SEQ ID NO:3. In some embodiments, the codon-optimized polynucleotide that encodes the above-identified engineered OAC enzymes comprises a nucleotide sequence that is at least 95% identical to any one of the sequences set forth in SEQ ID NO: 1-SEQ ID NO: 186. In some embodiments, the codon-optimized polynucleotide that encodes the above-identified engineered OAC enzymes comprises a nucleotide sequence that is at least 95% identical to sequence set forth in SEQ ID NO: 142. In some embodiments, the codon-optimized polynucleotide is inserted in a vector configured for replication and protein expression in microbial (e.g., yeast) cells.

[0017] It is expected that the above-identified engineered OAC enzymes from a microorganism would have low amino acid sequence homology (e.g., less than 60%, less than 50%, less than 40%, less than 30% or less than 20% sequence homology) to amino acid sequences of OAC from a Cannabis sp (for example, to sequence set forth in SEQ ID NO: 379).

### BRIEF DESCRIPTION OF THE DRAWINGS

[0018] FIG. 1A depicts a generalized cannabinoid biosynthesis pathway, including structures of cannabinoid molecules and variants.

[0019] FIG. 1B depicts an olivetolic acid-specific cannabinoid biosynthesis pathway.

[0020] FIG. 2 depicts condensation reaction mechanisms which could result in the formation of olivetolic acid from olivetol, including C2-C7 intramolecular aldol, Diekmann condensation, Claisen condensation and Knoenvagel condensation.

[0021] FIG. 3 depicts the domain architecture of a polyketide synthase enzyme (PKS) including domains which might function as independent cyclase enzymes.

[0022] FIG. 4 shows graphs of HPLC data showing olivetolic acid production in vivo by altOAC 75 with amino acid sequence set forth in SEQ ID NO: 334.

[0023] FIG. 5 shows an exemplary clustermap comparing selected altOAC enzymes. The value in each cell is the percentage of identical amino acid residues normalized by the ratio of alignment length to sequence length, computed with BLAST (Basic Local Alignment Search Tool, NCBI).

[0024] FIG. 6 shows relative amount of CBGA produced in recombinant yeast cells capable of generating downstream cannabinoids depending on the OAC genes expressed in these cells. It depicts the yield of the cannabinoid, cannabigerolic acid (CBGA), via expression of an optimized cannabis olivetolic acid cyclase (csOAC) alone (SEQ ID NO: 187), or in combination with other OAC enzyme constructs in the recombinant host expressing downstream cannabinoid enzymes.

### DETAILED DESCRIPTION OF EMBODIMENTS

### Abbreviations and Definitions

[0025] To facilitate understanding of the invention, a number of terms and abbreviations as used herein are defined below as follows:

[0026] Conservative amino acid substitutions: As used herein, when referring to mutations in a protein, “conservative amino acid substitutions” are those in which at least one amino acid of the polypeptide encoded by the nucleic acid sequence is substituted with another amino acid having similar characteristics. Examples of conservative amino acid substitutions are ser for ala, thr, or cys; lys for arg; gln for asn, his, or lys; his for asn; glu for asp or lys; asn for his or gln; asp for glu; pro for gly; leu for ile, phe, met, or val; val for ile or leu; ile for leu, met, or val; arg for lys; met for phe; tyr for phe or trp; thr for ser; trp for tyr; and phe for tyr.

[0027] Functional variant: The term “functional variant,” as used herein, refers to a recombinant enzyme such as a OAC enzyme that comprises a nucleotide and/or amino acid sequence that is altered by one or more nucleotides and/or amino acids compared to the nucleotide and/or amino acid sequences of the parent protein and that is still capable of performing an enzymatic function (e.g., synthesis of olivetolic acid) of the parent enzyme. In other words, the modifications in the amino acid and/or nucleotide sequence of the parent enzyme may cause desirable changes in reaction parameters without altering fundamental enzymatic function encoded by the nucleotide sequence or containing the amino acid sequence. The functional variant may have conservative change including nucleotide and amino acid substitutions, additions and deletions. These modifications can be introduced by standard techniques known in the art, such as site-directed mutagenesis and random PCR-mediated mutagenesis, and may comprise natural as well as non-natural nucleotides and amino acids. Also envisioned is the use of amino acid analogs, e.g. amino acids not DNA or RNA encoded in biological systems, and labels such as fluorescent dyes, radioactive elements, electron dense agents, or any other protein modification, now known or later discovered.

[0028] The term “modified” or “engineered”, or “variant”, as used in reference to nucleic acid molecules and protein molecules, e.g., an engineered enzyme, implies that such molecules are created by human intervention and they are non-naturally occurring. The engineered enzyme is a polypeptide or peptide having an altered amino acid sequence, relative to an unmodified or wild-type protein, such as starting naturally occurring enzyme (wild-type enzyme), or a portion thereof. An engineered enzyme is a polypeptide or peptide which differs from a wild-type enzyme sequence, or a portion thereof, by one or more amino acid substitutions, deletions, additions, or combinations thereof. Sequence of an engineered enzyme can contain 1, 2, 3, 4, 5, 6, 7, 8, 9, 10, 11, 12, 13, 14, 15, 16, 17, 18, 19, 20, 21, 22, 23, 24, 25, 26, 27, 28, 29, 30 or more amino acid differences (e.g., mutations) compared to the sequence of starting wild-type enzyme. An engineered enzyme generally exhibits at least 70%, 80%, 85%, 86%, 87%, 88%, 89%, 90%, 91%, 92%, 93%, 94%, 95%, 96%, 97%, 98%, 99% or more sequence identity to a corresponding starting wild-type enzyme. An engineered enzyme can exhibit at least 70%, 80%, 85%, 86%, 87%, 88%, 89%, 90%, 91%, 92%, 93%, 94%, 95%, 96%, 97%, 98%, 99% or more sequence homology to a corresponding starting wild-type enzyme. Non-naturally occurring amino acids as well as naturally occurring amino acids are included within the scope of permissible substitutions or additions. An engineered enzyme is not limited to any enzymes made or generated by a particular method of making and includes, for example, an engineered enzyme made or generated by genetic selection, protein engineering, directed evolution, de novo recombinant DNA techniques, or combinations thereof.

[0029] In some embodiments, variants of an engineered enzyme displaying only non-substantial or negligible differences in structure can be generated by making conservative amino acid substitutions in the engineered enzyme. By doing this, engineered enzyme variants that comprise a sequence having at least 90% (90%, 91%, 92%, 93%, 94%, 95%, 96%, 97%, 98%, and 99%) sequence identity with wild-type or another engineered enzyme sequences can be generated, retaining at least one functional activity of the engineered enzyme, e.g., ability to catalyze a specific reaction. Examples of conservative amino acid changes are known in the art. Examples of non-conservative amino acid changes that are likely to cause major changes in protein structure are those that cause substitution of (a) a hydrophilic residue, e.g., serine or threonine, for (or by) a hydrophobic residue, e.g., leucine, isoleucine, phenylalanine, valine or alanine; (b) a cysteine or proline for (or by) any other residue; (c) a residue having an electropositive side chain, e.g., lysine, arginine, or histidine, for (or by) an electronegative residue, e.g., glutamic acid or aspartic acid; or (d) a residue having a bulky side chain, e.g., phenylalanine, for (or by) one not having a side chain, e.g., glycine. Methods of making targeted amino acid substitutions, deletions, truncations, and insertions are generally known in the art. For example, amino acid sequence variants can be prepared by mutations in the DNA. Methods for polynucleotide alterations are well known in the art, for example, Kunkel et al. (1987) Methods in Enzymol. 154:367-382; U.S. Pat. No. 4,873,192 and the references cited therein.

[0030] The term “sequence identity” as used herein refers to the sequence identity between polynucleotides or proteins at the nucleotide or amino acid level, respectively. “Sequence identity” is a measure of identity between proteins at the amino acid level and a measure of identity between nucleic acids at nucleotide level. The protein sequence identity may be determined by comparing the amino acid sequence in a given position in each sequence when the sequences are aligned. Similarly, the nucleic acid sequence identity may be determined by comparing the nucleotide sequence in a given position in each sequence when the sequences are aligned. “Sequence identity” means the percentage of identical subunits at corresponding positions in two sequences when the two sequences are aligned to maximize subunit matching, i.e., taking into account gaps and insertions. Sequence identity is present when a subunit position in both of the two sequences is occupied by the same nucleotide or amino acid, e.g., if a given position is occupied by an adenine in each of two DNA molecules, then the molecules are identical at that position. Methods for the alignment of sequences for comparison are well known in the art, such methods include the BLAST algorithm, which calculates percent sequence identity and performs a statistical analysis of the similarity between the two sequences. The software for performing BLAST analysis is publicly available through the National Center for Biotechnology Information (NCBI) website.

[0031] The term “sequence homology” as used herein is a measure of similarity and refers to the sequence similarity between polynucleotides or proteins at the nucleotide or amino acid level, respectively. The protein sequence homology may be determined by comparing the amino acid sequence in a given position in each sequence when the sequences are aligned. Similarly, the nucleic acid sequence homology may be determined by comparing the nucleotide sequence in a given position in each sequence when the sequences are aligned. “Sequence homology” means the percentage of homologous subunits (i.e., amino acids) at corresponding positions in two sequences when the two sequences are aligned to maximize subunit matching, i.e., taking into account gaps which factor in insertions and deletions in the aligned sequences. Sequence homology is present when a subunit position in each of the two or more sequences is occupied by identical amino acid residues or functionally similar amino acid residues (e.g., isosteric or isoelectric amino acid identities; amino acid residues that belong to the same functional class, such as e.g. positively charged residues, or small hydrophobic residues). Sequence homology is absent when a subunit position in each of the two or more sequences is occupied by a functionally different amino acid (i.e., lacking structural and/or functional similarity). Methods for the alignment of sequences for comparison are well known in the art, such methods include the BLAST algorithm, which calculates percent sequence homology and performs a statistical analysis of the homology between the two sequences.

[0032] The terms “corresponding to position(s)” or “position(s) . . . with reference to position(s)” of or within a peptide or a polynucleotide, such as recitation that nucleotides or amino acid positions “correspond to” nucleotides or amino acid positions of a disclosed sequence, such sequence set forth in the Sequence Listing, refers to nucleotides or amino acid positions identified in the polynucleotide or in the peptide upon alignment with the disclosed sequence using a standard alignment algorithm, such as the BLAST algorithm (NCBI). One skilled in the art can identify any given amino acid residue in a given peptide at a position corresponding to a particular position of a reference sequence, such as set forth in the Sequence Listing, by performing alignment of the peptide sequence with the reference sequence (for example, by using BLASTP publicly available through the NCBI website), matching the corresponding position of the reference sequence with the position in peptide sequence and thus identifying the amino acid residue within the peptide. Amino acid positions corresponding to the recited residues can be also determined by structural alignment to the experimentally-determined template structure in the PDB (as given by the PDB accession code after making structural truncations corresponding to the SEQ ID NO of interest). The reference structures used in the structural alignment can be experimentally determined or generated by homology modeling using state of the art homology modeling methods such as Rosetta or PyRosetta macromolecular software suites, machine learning models such as AlphaFold2, or the like. Other useful structural alignment methods and/or programs include, but are not limited to, TM-align, PyMOL (superalign, cealign, and align methods), LSQMAN, Fr-TM-align, DALI, DaliLite, CE, CE-MC, and the like.

[0033] Recombinant nucleic acid and recombinant protein: As used herein, a recombinant nucleic acid or protein is a nucleic acid or protein produced by recombinant DNA technology, e.g., as described in Green and Sambrook (2012).

[0034] Polypeptide, protein, and peptide: The terms “polypeptide,” “protein,” and “peptide” are used herein interchangeably to refer to amino acid chains in which the amino acid residues are linked by peptide bonds or modified peptide bonds. The amino acid chains can be of any length of greater than two amino acids. Unless otherwise specified, the terms “polypeptide,” “protein,” and “peptide” also encompass various modified forms thereof. Such modified forms may be naturally occurring modified forms or chemically modified forms. Examples of modified forms include, but are not limited to, glycosylated forms, phosphorylated forms, myristoylated forms, palmitoylated forms, ribosylated forms, acetylated forms, and the like. Modifications also include intra-molecular crosslinking and covalent attachment of various moieties such as lipids, flavin, biotin, polyethylene glycol or derivatives thereof, and the like. In addition, modifications may also include protein cyclization, branching of the amino acid chain, and cross-linking of the protein. Further, amino acids other than the conventional twenty amino acids encoded by genes may also be included in a polypeptide.

[0035] The term “protein” or “polypeptide” may also encompass a “purified” polypeptide that is substantially separated from other polypeptides in a cell or organism in which the polypeptide naturally occurs (e.g., 30%, 40%, 50%, 60%, 70%, 80%, 90%, 95%, 96%, 97%, 98%, 99%, 100% free of contaminants).

[0036] Primer, probe and oligonucleotide: The terms “primer,” “probe,” and “oligonucleotide” may be used herein interchangeably to refer to a relatively short nucleic acid fragment or sequence. They can be DNA, RNA, or a hybrid thereof, or chemically modified analogs or derivatives thereof. Typically, they are single-stranded. However, they can also be double-stranded having two complementing strands that can be separated apart by denaturation. In certain aspects, they are of a length of from about 8 nucleotides to about 200 nucleotides. In other aspects, they are from about 12 nucleotides to about 100 nucleotides. In additional aspects, they are about 18 to about 50 nucleotides. They can be labeled with detectable markers or modified in any conventional manners for various molecular biological applications.

[0037] Vector: As used herein, the term “vector” refers to a nucleic acid molecule capable of transporting another nucleic acid to which it has been linked. One type of vector is an episome, i.e., a nucleic acid capable of extra-chromosomal replication. Various vectors are those capable of autonomous replication and/expression of nucleic acids to which they are linked. Vectors capable of directing the expression of genes to which they are operatively linked are referred to herein as “expression vectors.”

[0038] Linker: The term “linker” refers to a short amino acid sequence that separates multiple domains of a polypeptide. In some embodiments, the linker prohibits energetically or structurally unfavorable interactions between the discrete domains.

[0039] Cannabinoid: As used herein, the term “cannabinoid” refers to a family of structurally related aromatic meroterpenoid molecules. Cannabinoids are generally formed by the enzymatic fusion, by a cannabinoid synthase (having geranylpyrophosphate:olivetolate geranyltransferase activity), of an alkylresorcylic acid

[chemical structure]

where R₁=CH₃, (CH₂)₂CH₃ (divarinolic acid), (CH₂)₄CH₃ (olivetolic acid), or (CH₂)₆CH₃, with a polyprenyl pyrophosphate such as geranyl pyrophosphate, neryl pyrophosphate, geranylgeranyl pyrophosphate, of farnesyl pyrophosphate (FIG. 1; see also Luo et al., 2019; Carvalho et al., 2017; and Gülck and Møller, 2020 and references cited therein). The polyprenyl pyrophosphate is synthesized by geranyl pyrophosphate synthase (GPPS) (U.S. Provisional Patent Application 63/141,486).

[0040] Codon optimized: As used herein, a recombinant gene is “codon optimized” when its nucleotide sequence is modified to accommodate codon bias of the host organism to improve gene expression and increase translational efficiency of the gene.

[0041] Expression cassette: As used herein, an “expression cassette” is a nucleic acid that comprises a gene and a regulatory sequence operatively coupled to the gene such that the promoter drives the expression of the gene in a cell. An example is a gene for an enzyme with a promoter functional in yeast, where the promoter is situated such that the promoter drives the expression of the enzyme in a yeast cell.

Olivetolic Acid Cyclase Enzymes from Microorganisms and Non-Cannabis Plants

[0042] Provided herein is an olivetolic acid cyclase (OAC or altOAC or PKSC) enzyme derived from a microorganism or a non-Cannabis plant, where the enzyme catalyzes cyclization of a polyketide (I) into a resorcyclic acid derivative (II), where R₁=CH₃, CH₂CH₃, (CH₂)₂CH₃, (CH₂)₃CH₃, (CH₂)₄CH₃, (CH₂)₅CH₃, or (CH₂)₆CH₃

[chemical structure]

[0043] Many enzymes in nature catalyze cyclization reactions of polyketides. The ability of the plant enzyme to make OAC is not unique; enzymes derived from other species are able to catalyze the same reaction if the substrate is present.

[0044] It is useful to have several possible enzymes to catalyze a single step in any biosynthesis pathway. A new enzyme may have better catalytic properties than the original enzyme, may be higher throughput or have better binding affinity for the substrate. Other properties can make an alternative enzyme desirable as well, including better expression in a heterologous host and greater robustness under fermentation conditions, or requirements that more closely match the requirements of other enzymes in the pathway. There is also a benefit to using multiple OAC enzymes in combination within a single host in order to take advantage of different properties of the enzymes. Some variant enzymes may have longer half-lives inside the host, and so would be able to sustain high rates of catalysis for a longer time period. An additional desirable property would be the ability to selectively make one of the alkyl chain variant cannabinoids depicted in FIG. 1A and FIG. 1B.

[0045] In some embodiments, the enzyme is engineered by selected conservative or non-conservative amino acid changes to alter its substrate specificity making them more or less likely to synthesize a specific alkyl chain variant. Other enzymes are able to synthesize multiple variants. Enzymes with increased specificity for only one chain length are desirable for industrial purposes as a pure substrate leads to a pure product and eliminates the need to separate different but closely related variants after the fermentation.

[0046] These enzymes may be sourced from nature or specificity may be engineered into an enzyme by changing some residues, resulting in a non-natural amino acid sequence with improved properties. An example of this is the Y24F mutation described in Yang (2016) that increases the capacity of the Cannabis OAC for making OA, and also increases its specificity for OA over the lactone byproduct.

[0047] Enzyme variations may also result from mutations introduced into the DNA and amino acid sequences to prevent or promote post translational modifications of the protein. Nonlimiting examples of post translational modifications include phosphorylation, acetylation, methylation, SUMOylation, ubiquitination, proteolytic cleavage, lipidation, including prenylation such as farnesylation or myristoylation, glycosylation, nitrosylation and biotinylation.

[0048] In some embodiments, the naturally occurring enzymes found in nature from non-Cannabis sources (e.g., a microorganism or a non-Cannabis plant) carries out the cyclization reaction using the same mechanism as the plant enzyme, i.e., a C2-C7 aldol cyclization. In other embodiments, the enzyme carries out the polyketide cyclization is by a different mechanism, for example Diekmann condensation, Claisen condensation or Knoevenagel condensation (FIG. 2).

[0049] Enzymes may be sourced from nature by homology to the plant enzyme, resulting in mostly DABB domain or DABB domain-like proteins. The OAC enzyme from Cannabis acts as a dimer. Novel altOAC or PKSC enzymes from other organisms may also act as dimer, though they need not necessarily dimerize in order to be active. They have potential to act as monomers or as higher order complexes, binding either other OACs or other proteins.

[0050] Enzymes that catalyze this type of reaction in fungi and bacteria are often involved in secondary metabolite biosynthesis. Genes involved in biosynthesis of a single compound are often organized into clusters in the genomes of fungi and bacteria, so searching genomes for secondary metabolite clusters is a way to uncover desirable candidate genes. Thus, in some embodiments, the altOAC or PKSC is encoded by a gene that is located within a secondary metabolite cluster in a microorganism.

[0051] Another source of cyclases is individual domains of fungal polyketide synthases (PKSs). Polyketides are the basis for the biosynthesis of many secondary metabolites. Polyketide synthases (PKSs) are the enzymes that biosynthesize polyketides and these enzymes are conserved in multiple kingdoms. PKSs are particularly common in bacteria, plants and fungi. PKS enzymes are classified into three types (FIG. 3). Type I PKS are large multifunctional multidomain proteins. The number and arrangement of the domains is varied and contributes to the diversity of molecules synthesized. Type II PKSs are multienzyme complexes with a single set of iterative activities. Type III PKSs are smaller, homodimers of condensing enzymes. See Shen, 2003 for review of topic. Due to greater domain diversity, a domain capable of cyclizing OL to form OA is most likely to reside in a type I PKS, but could also be found in in a Type II or Type III PKS. Polyketide synthases catalyze the first committed step in cannabinoid biosynthesis, an assembly of a linear polyketide form short chain fatty acyl CoA precursors such as malonyl CoA and hexanoyl CoA. See Herbst, 2018 for review. The type of PKSs most often found in fungi are modular proteins that both assemble the polyketide and cyclize it (FIG. 3). Those PKSs therefore contain at least one cyclase domain (e.g., III* in FIG. 3). PKS enzymes that synthesize multicyclic structures often contain multiple domains with cyclase activity. Expression of the relevant cyclase domain from a fungal PKS alone enable cyclization of the linear polyketide to form OA. The most likely domains to independently catalyze cyclization are the PT (product template) domain and the TE-CLC domains. TE-CLC domains have thioesterase (TE) activity and also catalyze cyclization by an intramolecular Claisen condensation mechanism. They are also called Claisen cyclase domains (CLC)s reflecting this activity. Multiples of these domains may be found within a given PKS enzyme. PT domains, reviewed in Herbst, 2018 may also have elements of KS_DH domains.

[0052] It is expected that engineered altOAC or PKSC enzyme from a microorganism would have low amino acid sequence homology (e.g., less than 60%, less than 50%, less than 40%, less than 30% or less than 20% sequence homology) to amino acid sequences of OAC from a Cannabis sp (for example, to sequence set forth in SEQ ID NO: 379). In some preferred embodiments, the engineered olivetolic acid cyclase enzyme has an amino acid sequence that is less than 60% homologous to sequence set forth in SEQ ID NO: 334. In some preferred embodiments, the engineered olivetolic acid cyclase enzyme has an amino acid sequence that is less than 50%, less than 40%, less than 30% or less than 20% homologous to sequence set forth in SEQ ID NO: 334.

[0053] The present teachings include an engineered olivetolic acid cyclase (OAC or altOAC or PKSC) enzyme derived from a microorganism or a non-Cannabis plant, wherein the enzyme catalyzes cyclization of a polyketide (I) into a resorcyclic acid derivative (II), where R₁=CH₃, CH₂CH₃, (CH₂)₂CH₃, (CH₂)₃CH₃, (CH₂)₄CH₃, (CH₂)₅CH₃, or (CH₂)₆CH₃

[chemical structure]

and wherein the enzyme comprises an amino acid sequence that is at least 90% or at least 95% identical, or at least 99% identical to any one of the sequences set forth in SEQ ID NO: 193-SEQ ID NO: 378. In some preferred embodiments, the enzyme comprises an amino acid sequence that is one of the sequences set forth in SEQ ID NO: 193-SEQ ID NO: 378. In some embodiments, the enzyme comprises an amino acid sequence that is at least 20%, at least 30%, at least 40%, at least 50%, at least 60%, at least 70%, at least 80%, or at least 90% identical to SEQ ID NO: 334. In some embodiments, the enzyme comprises an amino acid sequence that is at least 50%, at least 60%, at least 70%, at least 80%, or at least 90% identical to the sequence set forth in SEQ ID NO: 193, or in SEQ ID NO: 194, or in SEQ ID NO: 195.

[0054] The present teachings also include an isolated codon-optimized polynucleotide that encodes the above-identified engineered OAC enzymes, comprising a nucleotide sequence that is at least 50%, at least 60%, at least 70%, at least 80%, or at least 90% identical to the sequence set forth in SEQ ID NO: 1, or in SEQ ID NO: 2, or in SEQ ID NO: 3. In some embodiments, the codon-optimized polynucleotide that encodes the above-identified engineered OAC enzymes comprises a nucleotide sequence that is at least 90%, at least 95%, or at least 99% identical to any one of the sequences set forth in SEQ ID NO: 1-SEQ ID NO: 186. In some embodiments, the codon-optimized polynucleotide that encodes the above-identified engineered OAC enzymes comprises a nucleotide sequence that is at least 50%, at least 60%, at least 70%, at least 80%, at least 90%, or at least 95% identical to SEQ ID NO: 142. In some embodiments, the codon-optimized polynucleotide is inserted in a vector configured for replication and protein expression in microbial (e.g., yeast) cells.

[0055] In some embodiments, engineered olivetolic acid cyclase enzyme (e.g., PKSC) sequences listed in Table 1 and in the Sequence Listing are defined as (i) having at least 50% sequence identity to a reference sequence and (ii) functioning as part of a large, multiprotein complex. In some embodiments, engineered PKSC sequences, such as comprising amino acid sequence set forth in SEQ ID NOs: 196, 199, 202, 205, 208, 211, 214, 217, 220, 223, 235, 238 or 250, have at least 50% sequence identity to SEQ ID NO: 193. In other embodiments, engineered PKSC sequences, such as comprising amino acid sequence set forth in SEQ ID NOs: 197, 203, 206, 209, 212, 215, 218, 221, 224, 236, 251, 256 or 257, have at least 50% sequence identity to SEQ ID NO: 194. In yet other embodiments, engineered PKSC sequences, such as comprising amino acid sequence set forth in SEQ ID NOs: 204, 207, 210, 213, 216, 219, 222, 237, 255, 258, 259, have at least 50% sequence identity to SEQ ID NO: 195. In yet other embodiments, engineered olivetolic acid cyclase enzyme (e.g., altOAC) sequences listed in Table 1 and in the Sequence Listing comprise an amino acid sequence that is at least 50% identical to the sequence set forth in either SEQ ID NO: 385 or SEQ ID NO: 386. In yet other embodiments, engineered olivetolic acid cyclase enzyme (e.g., altOAC) sequences listed in Table 1 and in the Sequence Listing comprise an amino acid sequence that is at least 50% identical to the sequence set forth in SEQ ID NO: 334.

[0056] AltOAC sequences (for example, SEQ ID NO: 260-SEQ ID NO: 378) are characterized by greater sequence diversity, smaller protein size and the ability to act independently of non-OAC polypeptides. OACs also frequently contain a DABB domain, a protein motif that is associated with stress response. They share this in common with the OAC enzyme from Cannabis sativa and as a result may have some homology to csOAC. Similarities in amino acid sequences underlie similarities in protein function for the claimed engineered olivetolic acid cyclase enzyme. In some embodiments, altOAC enzymes contain a DABB domain, which is a structural motif that is often present in proteins involved in stress response in plants. Two sequences of DABB domain are provided herein (SEQ ID NO: 385-SEQ ID NO: 386), which can be used as reference sequences during aligning of sequences of altOAC enzymes disclosed herein. In some preferred embodiments, engineered olivetolic acid cyclase enzyme (e.g., altOAC) sequences comprise an amino acid sequence that is at least 50% identical to the sequence set forth in either SEQ ID NO: 385 or SEQ ID NO: 386. Not all proteins that contain a DABB domain will be capable of catalyzing the OAC reaction, but the presence of a DABB domain is likely in sequences that are catalytically capable of catalyzing the OAC reaction. Similarly, PKSC enzymes are likely to contain structural interaction motifs to facilitate their recruitment to and interaction with other subunits in a multi protein complex.

[0057] PKSC enzymes were chosen to belong within (derived from) the following protein superfamilies: Abhydrolase superfamily, ABM superfamily, Acyl_transf_1 superfamily, AdoMet_MTases superfamily, AFD_class_I superfamily, BioC superfamily, cond_enzymes superfamily, cupin_RmlC-like superfamily, entF superfamily, EthD superfamily, fabG superfamily, hot_dog superfamily, MDR superfamily, NADB_Rossmann superfamily, NRPS_MxcG superfamily, omega_3_PfaA superfamily, PKS_MbtD superfamily, PKS_NbtC superfamily, PP-binding superfamily, PRK12467 superfamily, PKS_MbtD superfamily, PKS_NbtC superfamily, PP-binding superfamily, and/or PRK12467 superfamily. These superfamilies have the corresponding accession numbers as provided by the National Center for Biotechnology Information (NCBI) structure database (NCBI, Conserved Protein Domain Families): c117068, c109936, c108282, c116912, c117173, c127680, c117068, c137044, c140423, c110022, c121494, c135902, c135333, c109938, c121454, c140423, c141646, c137173, c100509, c141573, c141574, c136129.

[0058] PKSC enzymes within these superfamilies of proteins were also chosen to include one or more of the following protein domains: A_NRPS, ACP, AcpP, acyl_carrier, Acyl_transf_1, ADH_zinc_N, AdoMet_MTases, alpha_am_amid, AMP-binding, BioC, CaiC, Cupin_2, cupin_RmlC-like, Dabb, enoyl_red, EntF, entF, FabD, fabG, ketoacyl-synt, KR, KR_2_FAS_SDR_x, KR_FAS_SDR_x, ManC, Methyltransf_11, Methyltransf_12, NRPS_MxcG, omega_3_PfaA, PKS, PKS_AT, PKS_DH, PKS_ER, PKS_KR, PKS_KS, PKS_MbtD, PKS_MbtD superfamily, PKS_NbtC, PKS_NbtC superfamily, PKS_PP, PKS_TE, PksD, PLN02752, PLN02836, PP-binding, PP-binding superfamily, PRK06333, PRK07314, PRK12467, PRK12467 superfamily, PS-DH, PT_fungal_PKS, PTZ00050, PTZ00354, Qor, quinone_pig3, SAT, Thioesterase, UbiE, and/or ubiE.

### Organisms Originating the Enzymes

[0059] The altOAC and PKSC enzymes can be naturally occurring enzymes, or enzymes derived from a naturally occurring enzyme, now known or later discovered, that occurs in any living organism, for example a bacterium, an archaeon, a protist, a fungus, an algae, an animal or a plant.

[0060] Many enzymes catalyze reactions of these classes using similar substrates, but have never been tested for activity on cannabinoids. To determine a source of an altOAC or PKSC enzyme, microbes can be screened for bioconversion activity of appropriate cannabinoids, after the methods of Abbott (1977). Enzymes from the above listed enzyme classes can be found, e.g., from the sequenced genomes, by cloning enzymes homologous to other cyclases, or by other cloning methods, thereby identifying good candidates for OAC activity. Organisms that make molecules similar to desired cannabinoids can also be identified from literature and those genomes searched as well to identify additional candidate enzymes. Bioinformatics methods to do this are provided in U.S. Pat. No. 10,671,632.

[0061] In some embodiments, the gene for the altOAC or PKSC enzyme is derived from a bacterium. It is envisioned that an altOAC or PKSC enzyme derived from any bacterium now known or later discovered can be utilized in the present invention. For example, the bacterium can be from phylum Abditibacteriota, including class Abditibacteria, including order Abditibacteriales; phylum Abyssubacteria or Acidobacteria, including class Acidobacteriia, Blastocatellia, Holophagae, Thermoanaerobaculia, or Vicinamibacteria, including order Acidobacteriales, Bryobacterales, Blastocatellales, Acanthopleuribacterales, Holophagales, Thermotomaculales, Thermoanaerobaculales, or Vicinamibacteraceae; phylum Actinobacteria, including class Acidimicrobiia, Actinobacteria, Actinomarinidae, Coriobacteriia, Nitriliruptoria, Rubrobacteria, or Thermoleophilia, including orders Acidimicrobiales, Acidothermales, Actinomycetales, Actinopolysporales, Bifidobacteriales, Nanopelagicales, Catenulisporales, Corunebacteriales, Cryptosporangiales, Frankiales, Geodermatophilales, Glycomycetales, Jiangellales, Micrococcales, Micromonosporales, Nakamurellales, Propionibacteriales, Pseudonocardiales, Sporichthyales, Streptomycetales, Streptosporangiales, Actinomarinales, Coriobacteriales, Eggerthellales, Egibacterales, Egicoccales, Euzebyales, Nitriliruptorales, Gaiellales, Rubrobacterales, Solirubrobacterales, or Thermoleophilales; phylum Aquificae, including class Aquificae, including order Aquificales or Desulfurobacteriales; phylum Armatimonadetes, including class Armatimonadia, including order Armatimonadales, Capsulimonadales, Chthonomonadetes, Chthonomonadales, Fimbriimonadia, or Fimbriimonadales; phylum Aureabacteria or Bacteroidetes, including class Armatimonadia, Bacteroidia, Chitinophagia, Cytophagia, Flavobacteria, Saprospiria or Sphingobacteriia, including order Bacteroidales, Marinilabiliales, Chitinophagales, Cytophagales, Flavobacteriales, Saprospirales, or Sphingopacteriales; phylum Balneolaeota, Caldiserica, Calditrichaeota, or Chlamydiae, including class Balneolia, Caldisericia, Calditrichae, or Chlamydia, including order Balneolales, Caldisericales, Calditrichales, Anoxychlamydiales, Chlamydiales, or Parachlamydiales; phylum Chlorobi or Chloroflexi, including class Chlorobia, Anaerolineae, Ardenticatenia, Caldilineae, Thermofonsia, Chloroflexia, Dehalococcoidia, Ktedonobacteria, Tepidiformia, Thermoflexia, Thermomicrobia, or Sphaerobacteridae, including order Chlorobiales, Anaerolineales, Ardenticatenales, Caldilineales, Chloroflexales, Herpetosiphonales, Kallotenuales, Dehalococcoidales, Dehalogenimonas, Ktedonobacterales, Thermogemmatisporales, Tepidiformales, Thermoflexales, Thermomicrobiales, or Sphaerobacterales; phylum Chrysiogenetes, Cloacimonetes, Coprothermobacterota, Cryosericota, or Cyanobacteria, including class Chrysiogenetes, Coprothermobacteria, Gloeobacteria, or Oscillatoriophycideae, including order Chrysiogenales, Coprothermobacterales, Chroococcidiopsidales, Gloeoemargaritales, Nostocales, Pleurocapsales, Spirulinales, Synechococcales, Gloeobacterales, Chroococcales, or Oscillatoriales; phyla: Eferribacteres, Deinococcus-thermus, Dictyoglomi, Dormibacteraeota, Elusimicrobia, Eremiobacteraeota, Fermentibacteria, or Fibrobacteres, including class Deferribacteres, Deinococci, Dictyoglomia, Elusimicrobia, Endomicrobia, Chitinispirillia, Chitinivibrionia, or Fibrobacteria, including order Deferribacterales, Deinococcales, Thermales, Dictyoglomales, Elusimicrobiales, Endomicrobiales, Chitinspirillales, Chitinvibrionales, Fibrobacterales, or Fibromonadales; phylum Firmicutes, Fusobacteria, Gemmatimonadetes, or Hydrogenedentes, including class Bacilli, Clostridia, Erysipelotrichia, Limnochordia, Negativicutes, Thermolithobacteria, Tissierellia, Fusobacteriia, Gemmatimonadetes, Longimicrobia, including order Bacillales, Lactobacillales, Borkfalkiales, Clostridiales, Halanaerobiales, Natranaerobiales, Thermoanaerobacterales, Erysipelotrichales, Limnochordales, Acidaminococcales, Selenomonadales, Veillonellales, Thermolithobacterales, Tissierellales, Fusobacteriales, Gemmatimonadales, or Longimicrobia; phylum Hydrogenedentes, Ignavibacteriae, Kapabacteria, Kiritimatiellaeota, Krumholzibacteriota, Kryptonia, Latescibacteria, LCP-89, Lentisphaerae, Margulisbacteria, Marinimicrobia, Melainabacteria, Nitrospinae, or Omnitrophica, including class Ignavibacteria, Kiritimatiellae, Krumholzibacteria, Lentisphaeria, Oligosphaeria, or Nitrospinae, including order Ignavibacteriales, Kiritimatiellales, Krumholzibacteriales, Lentisphaerales, Victivallales, Oligosphaerales, or Nitrospinia; phylum Omnitrophica or Planctomycetes, including class Brocadiae, Phycisphaerae, Planctomycetia, or Phycisphaerales, including order Sedimentisphaerales, Tepidisphaerales, Gemmatales, Isosphaerales, Pirellulales, or Planctomycetales; phylum Proteobacteria including class Acidithiobacillia, Alphaproteobacteria, Betaproteobacteria, Lambdaproteobacteria, Muproteobacteria, Deltaproteobacteria, Epsilonproteobacteria, Gammaproteobacteria, Hydrogenophilalia, Oligoflexia, or Zetaproteobacteria, including order Acidithiobacillales, Caulobacterales, Emcibacterales, Holosporales, Iodidimonadales, Kiloniellales, Kopriimonadales, Kordiimonadales, Magnetococcales, Micropepsales, Minwuiales, Parvularculales, Pelagibacterales, Rhizobiales, Rhodobacterales, Rhodospirillales, Rhodothalassiales, Rickettsiales, Sneathiellales, Sphingomonadales, Burkholderiales, Ferritrophicales, Ferrovales, Neisseriales, Nitrosomonadales, Procabacteriales, Rhodocyclales, Bradymonadales, Acidulodesulfobacterales, Desulfarculales, Desulfobacterales, Desulfovibrionales, Desulfurellales, Desulfuromonadales, Myxococcales, Syntrophobacterales, Campylobacterales, Nautiliales, Acidiferrobacterales, Aeromonadales, Alteromonadales, Arenicellales, Cardiobacteriales, Cellvibrionales, Chromatiales, Enterobacterales, Immundisolibacterales, Legionellales, Methylococcales, Nevskiales, Oceanospirillales, Orbales, Pasteurellales Pseudomonadales, Salinisphaerales, Thiotrichales, Vibrionales, Xanthomonadales, Hydrogenophilales, Bacteriovoracales, Bdellovibrionales, Oligoflexales, Silvanigrellales, or Mariprofundales; phylum Rhodothermaeota, Saganbacteria, Sericytochromatia, Spirochaetes, Synergistetes, Tectomicrobia, or Tenericutes, including class Rhodothermia, Spirochaetia, Synergistia, Izimaplasma, or Mollicutes, including order Rhodothermales, Brachyspirales, Brevinematales, Leptospirales, Spirochaetales, Synergi stales, Acholeplasmatales, Anaeroplasmatales, Entomoplasmatales, or Mycoplasmatales; phylum Thermodesulfobacteria, Thermotogae, Verrucomicrobia, or Zixibacteria, including class Thermodesulfobacteria, Thermotogae, Methylacidiphilae, Opitutae, Spartobacteria, or Verrucomicrobiae, including order Thermodesulfobacteriales, Kosmotogales, Mesoaciditogales, Petrotogales, Thermotogales, Methylacidiphilales, Opitutales, Puniceicoccales, Xiphinematobacter, Chthoniobacterales, Terrimicrobium, or Verrucomicrobiales.

[0062] In other embodiments, the gene for the enzyme is derived from an archaeon. It is envisioned that an altOAC or PKSC enzyme derived from any archaeon now known or later discovered can be utilized in the present invention. For example, the archaeon can be from phylum Euryarchaeota, including class Archaeoglobi, Hadesarchaea, Halobacteria, Methanobacteria, Methanococci, Methanofastidiosa, Methanomicrobia, Methanopyri, Nanohaloarchaea, Theionarchaea, Thermococci, or Thermoplasmata, including order Archaeoglobales, Hadesarchaeales, Halobacteriales, Methanobacteriales, Methanococcales, Methanocellales, Methanomicrobiales, Methanophagales, Methanosarcinales, Methanopyrales, Thermococcales, Methanomassiliicoccales, Thermoplasmatales, or Nanoarchaeales; DPANN superphylum, including subphyla Aenigmarcheota, Altiarchaeota, Diapherotrites, Micrarchaeota, Nanoarchaeota, Pacearchaeota, Parvarchaeota, or Woesearchaeota; TACK superphylum, including subphylum Korarchaeota, Crenarchaeota, Aigarchaeota, Geoarchaeota, Thaumarchaeota, or Bathyarchaeota; Asgard superphylum including subphylium Odinarchaeota, Thorarchaeota, Lokiarchaeota, Helarchaeota, or Heimdallarchaeota.

[0063] In additional embodiments, the gene for the altOAC or PKSC enzyme is derived from a fungus. It is envisioned that an altOAC or PKSC enzyme from any fungus now known or later discovered can be utilized in the present invention. This includes but is not limited to the phyla Chytridiomycota, Basidiomycota, Ascomycota, Blastocladiomycota, Ascomycota, Microsporidia, Basidiomycota, Glomeromycota, Symbiomycota, and Neocallimastigomycota. For example, the fungus can be from the phylum Ascomycota, including classes and orders Pezizomycotina, Arthoniomycetes, Coniocybomycetes, Dothideomycetes, Eurotiomycetes, Geoglossomycetes, Laboulbeniomycetes, Lecanoromycetes, Leotiomycetes, Lichinomycetes, Orbiliomycetes, Pezizomycetes, Sordariomycetes, Xylonomycetes, Lahmiales, Itchiclahmadion, Triblidiales, Saccharomycotina, Saccharomycetes, Taphrinomycotina, Archaeorhizomyces, Neolectomycetes, Pneumocystidomycetes, Schizosaccharomycetes, Taphrinomycetes; phylum Basidiomycota including subphyla or classes Pucciniomycotina, Ustilaginomycotina, Wallemiomycetes, and Entorrhizomycetes; subphylum Agaricomycotina including classes Tremellomycetes, Dacrymycetes, and Agaricomycetes; phylum Symbiomycota, including class Entorrhizomycota; subphylum Ustilaginomycotina including classes Ustilaginomycetes and Exobasidiomycetes; phylum Glomeromycota including classes Archaeosporomycetes, Glomeromycetes, and Paraglomeromycetes; subphylum Pucciniomycotina including orders and classes: Pucciniomycotina, Cystobasidiomycetes, Agaricostilbomycetes, Microbotryomycetes, Atractiellomycetes, Classiculomycetes, Mixiomycetes, and Cryptomycocolacomycetes; subphylum incertae sedis Mucoromyceta including orders Calcarisporiellomycota and Mucoromycota; phylum Mortierellomyceta including class Mortierellomycota; subphylum incertae sedis Entomophthoromycotina including order Entomophthorales; phylum Zoopagomyceta including classes Basidiobolomycota, Entomophthoromycota, Kickxellomycota, and Zoopagomycotina; subphylum incertae sedis Mucoromycotina including orders Mucorales, Endogonales, and Mortierellales; phylum Neocallimastigomycota including class Neocallimastigomycetes; phylum Blastocladiomycota including classes Physodermatomycetes and Blastocladiomycetes; phylum Rozellomyceta including classes Rozellomycota and Microsporidia; phylum Aphelidiomyceta including class Aphelidiomycota; Chytridiomyceta including classes Chytridiomycetes and Monoblepharidomycetes; and phylum Oomycota including classes or orders Leptomitales, Myzocytiopsidales, Olpidiopsidales, Peronosporales, Pythiales, Rhipidiales, Salilagenidiales, Saprolegniales, Sclerosporales, Anisolpidiales, Lagenismatales, Rozellopsidales, and Haptoglossales.

### Nucleic Acids

[0064] The present invention is additionally directed to nucleic acids encoding any of the above-described altOAC and PKSC enzymes including but are not limited to the microbial and non-Cannabis plant OACs. Gene sequences can be determined using the techniques disclosed in U.S. Pat. No. 10,671,632, or by any other method known in the art. Table 1 provides SEQ ID NOs for nucleic acid and amino acid sequences listed in the sequence listing provided below. A Clustermap showing homologies between the amino acid sequences of select altOACs is provided in FIG. 5.

TABLE 1

| | Codon Optimized | Amino Acid Sequence |
|---|---|---|
| NAME | Nucleic Acid Sequence | for Isolated Protein |
| PKSC1A | SEQ ID NO: 1 | SEQ ID NO: 193 |
| PKSC1B | SEQ ID NO: 2 | SEQ ID NO: 194 |
| PKSC1C | SEQ ID NO: 3 | SEQ ID NO: 195 |
| PKSC2A | SEQ ID NO: 4 | SEQ ID NO: 196 |
| PKSC2B | SEQ ID NO: 5 | SEQ ID NO: 197 |
| PKSC2C | SEQ ID NO: 6 | SEQ ID NO: 198 |
| PKSC3A | SEQ ID NO: 7 | SEQ ID NO: 199 |
| PKSC3B | SEQ ID NO: 8 | SEQ ID NO: 200 |
| PKSC3C | SEQ ID NO: 9 | SEQ ID NO: 201 |
| PKSC4A | SEQ ID NO: 10 | SEQ ID NO: 202 |
| PKSC4B | SEQ ID NO: 11 | SEQ ID NO: 203 |
| PKSC4C | SEQ ID NO: 12 | SEQ ID NO: 204 |
| PKSC5A | SEQ ID NO: 13 | SEQ ID NO: 205 |
| PKSC5B | SEQ ID NO: 14 | SEQ ID NO: 206 |
| PKSC5C | SEQ ID NO: 15 | SEQ ID NO: 207 |
| PKSC6A | SEQ ID NO: 16 | SEQ ID NO: 208 |
| PKSC6B | SEQ ID NO: 17 | SEQ ID NO: 209 |
| PKSC6C | SEQ ID NO: 18 | SEQ ID NO: 210 |
| PKSC7A | SEQ ID NO: 19 | SEQ ID NO: 211 |
| PKSC7B | SEQ ID NO: 20 | SEQ ID NO: 212 |
| PKSC7C | SEQ ID NO: 21 | SEQ ID NO: 213 |
| PKSC8A | SEQ ID NO: 22 | SEQ ID NO: 214 |
| PKSC8B | SEQ ID NO: 23 | SEQ ID NO: 215 |
| PKSC8C | SEQ ID NO: 24 | SEQ ID NO: 216 |
| PKSC9A | SEQ ID NO: 25 | SEQ ID NO: 217 |
| PKSC9B | SEQ ID NO: 26 | SEQ ID NO: 218 |
| PKSC9C | SEQ ID NO: 27 | SEQ ID NO: 219 |
| PKSC10A | SEQ ID NO: 28 | SEQ ID NO: 220 |
| PKSC10B | SEQ ID NO: 29 | SEQ ID NO: 221 |
| PKSC10C | SEQ ID NO: 30 | SEQ ID NO: 222 |
| PKSC11A | SEQ ID NO: 31 | SEQ ID NO: 223 |
| PKSC11B | SEQ ID NO: 32 | SEQ ID NO: 224 |
| PKSC11C | SEQ ID NO: 33 | SEQ ID NO: 225 |
| PKSC12A | SEQ ID NO: 34 | SEQ ID NO: 226 |
| PKSC12B | SEQ ID NO: 35 | SEQ ID NO: 227 |
| PKSC12C | SEQ ID NO: 36 | SEQ ID NO: 228 |
| PKSC13A | SEQ ID NO: 37 | SEQ ID NO: 229 |
| PKSC13B | SEQ ID NO: 38 | SEQ ID NO: 230 |
| PKSC13C | SEQ ID NO: 39 | SEQ ID NO: 231 |
| PKSC14A | SEQ ID NO: 40 | SEQ ID NO: 232 |
| PKSC14B | SEQ ID NO: 41 | SEQ ID NO: 233 |
| PKSC14C | SEQ ID NO: 42 | SEQ ID NO: 234 |
| PKSC15A | SEQ ID NO: 43 | SEQ ID NO: 235 |
| PKSC15B | SEQ ID NO: 44 | SEQ ID NO: 236 |
| PKSC15C | SEQ ID NO: 45 | SEQ ID NO: 237 |
| PKSC16A | SEQ ID NO: 46 | SEQ ID NO: 238 |
| PKSC16B | SEQ ID NO: 47 | SEQ ID NO: 239 |
| PKSC16C | SEQ ID NO: 48 | SEQ ID NO: 240 |
| PKSC17A | SEQ ID NO: 49 | SEQ ID NO: 241 |
| PKSC17B | SEQ ID NO: 50 | SEQ ID NO: 242 |
| PKSC17C | SEQ ID NO: 51 | SEQ ID NO: 243 |
| PKSC18A | SEQ ID NO: 52 | SEQ ID NO: 244 |
| PKSC18B | SEQ ID NO: 53 | SEQ ID NO: 245 |
| PKSC18C | SEQ ID NO: 54 | SEQ ID NO: 246 |
| PKSC19A | SEQ ID NO: 55 | SEQ ID NO: 247 |
| PKSC19B | SEQ ID NO: 56 | SEQ ID NO: 248 |
| PKSC19C | SEQ ID NO: 57 | SEQ ID NO: 249 |
| PKSC20A | SEQ ID NO: 58 | SEQ ID NO: 250 |
| PKSC20B | SEQ ID NO: 59 | SEQ ID NO: 251 |
| PKSC20C | SEQ ID NO: 60 | SEQ ID NO: 252 |
| PKSC21C | SEQ ID NO: 61 | SEQ ID NO: 253 |
| PKSC22C | SEQ ID NO: 62 | SEQ ID NO: 254 |
| PKSC23C | SEQ ID NO: 63 | SEQ ID NO: 255 |
| PKSC24B | SEQ ID NO: 64 | SEQ ID NO: 256 |
| PKSC25B | SEQ ID NO: 65 | SEQ ID NO: 257 |
| PKSC26C | SEQ ID NO: 66 | SEQ ID NO: 258 |
| PKSC27C | SEQ ID NO: 67 | SEQ ID NO: 259 |
| altOAC1 | SEQ ID NO: 68 | SEQ ID NO: 260 |
| altOAC2 | SEQ ID NO: 69 | SEQ ID NO: 261 |
| altOAC3 | SEQ ID NO: 70 | SEQ ID NO: 262 |
| altOAC4 | SEQ ID NO: 71 | SEQ ID NO: 263 |
| altOAC5 | SEQ ID NO: 72 | SEQ ID NO: 264 |
| altOAC6 | SEQ ID NO: 73 | SEQ ID NO: 265 |
| altOAC7 | SEQ ID NO: 74 | SEQ ID NO: 266 |
| altOAC8 | SEQ ID NO: 75 | SEQ ID NO: 267 |
| altOAC9 | SEQ ID NO: 76 | SEQ ID NO: 268 |
| altOAC10 | SEQ ID NO: 77 | SEQ ID NO: 269 |
| altOAC11 | SEQ ID NO: 78 | SEQ ID NO: 270 |
| altOAC12 | SEQ ID NO: 79 | SEQ ID NO: 271 |
| altOAC13 | SEQ ID NO: 80 | SEQ ID NO: 272 |
| altOAC14 | SEQ ID NO: 81 | SEQ ID NO: 273 |
| altOAC15 | SEQ ID NO: 82 | SEQ ID NO: 274 |
| altOAC16 | SEQ ID NO: 83 | SEQ ID NO: 275 |
| altOAC17 | SEQ ID NO: 84 | SEQ ID NO: 276 |
| altOAC18 | SEQ ID NO: 85 | SEQ ID NO: 277 |
| altOAC19 | SEQ ID NO: 86 | SEQ ID NO: 278 |
| altOAC20 | SEQ ID NO: 87 | SEQ ID NO: 279 |
| altOAC21 | SEQ ID NO: 88 | SEQ ID NO: 280 |
| altOAC22 | SEQ ID NO: 89 | SEQ ID NO: 281 |
| altOAC23 | SEQ ID NO: 90 | SEQ ID NO: 282 |
| altOAC24 | SEQ ID NO: 91 | SEQ ID NO: 283 |
| altOAC25 | SEQ ID NO: 92 | SEQ ID NO: 284 |
| altOAC26 | SEQ ID NO: 93 | SEQ ID NO: 285 |
| altOAC27 | SEQ ID NO: 94 | SEQ ID NO: 286 |
| altOAC28 | SEQ ID NO: 95 | SEQ ID NO: 287 |
| altOAC29 | SEQ ID NO: 96 | SEQ ID NO: 288 |
| altOAC30 | SEQ ID NO: 97 | SEQ ID NO: 289 |
| altOAC31 | SEQ ID NO: 98 | SEQ ID NO: 290 |
| altOAC32 | SEQ ID NO: 99 | SEQ ID NO: 291 |
| altOAC33 | SEQ ID NO: 100 | SEQ ID NO: 292 |
| altOAC34 | SEQ ID NO: 101 | SEQ ID NO: 293 |
| altOAC35 | SEQ ID NO: 102 | SEQ ID NO: 294 |
| altOAC36 | SEQ ID NO: 103 | SEQ ID NO: 295 |
| altOAC37 | SEQ ID NO: 104 | SEQ ID NO: 296 |
| altOAC38 | SEQ ID NO: 105 | SEQ ID NO: 297 |
| altOAC39 | SEQ ID NO: 106 | SEQ ID NO: 298 |
| altOAC40 | SEQ ID NO: 107 | SEQ ID NO: 299 |
| altOAC41 | SEQ ID NO: 108 | SEQ ID NO: 300 |
| altOAC42 | SEQ ID NO: 109 | SEQ ID NO: 301 |
| altOAC43 | SEQ ID NO: 110 | SEQ ID NO: 302 |
| altOAC44 | SEQ ID NO: 111 | SEQ ID NO: 303 |
| altOAC45 | SEQ ID NO: 112 | SEQ ID NO: 304 |
| altOAC46 | SEQ ID NO: 113 | SEQ ID NO: 305 |
| altOAC47 | SEQ ID NO: 114 | SEQ ID NO: 306 |
| altOAC48 | SEQ ID NO: 115 | SEQ ID NO: 307 |
| altOAC49 | SEQ ID NO: 116 | SEQ ID NO: 308 |
| altOAC50 | SEQ ID NO: 117 | SEQ ID NO: 309 |
| altOAC51 | SEQ ID NO: 118 | SEQ ID NO: 310 |
| altOAC52 | SEQ ID NO: 119 | SEQ ID NO: 311 |
| altOAC53 | SEQ ID NO: 120 | SEQ ID NO: 312 |
| altOAC54 | SEQ ID NO: 121 | SEQ ID NO: 313 |
| altOAC55 | SEQ ID NO: 122 | SEQ ID NO: 314 |
| altOAC56 | SEQ ID NO: 123 | SEQ ID NO: 315 |
| altOAC57 | SEQ ID NO: 124 | SEQ ID NO: 316 |
| altOAC58 | SEQ ID NO: 125 | SEQ ID NO: 317 |
| altOAC59 | SEQ ID NO: 126 | SEQ ID NO: 318 |
| altOAC60 | SEQ ID NO: 127 | SEQ ID NO: 319 |
| altOAC61 | SEQ ID NO: 128 | SEQ ID NO: 320 |
| altOAC62 | SEQ ID NO: 129 | SEQ ID NO: 321 |
| altOAC63 | SEQ ID NO: 130 | SEQ ID NO: 322 |
| altOAC64 | SEQ ID NO: 131 | SEQ ID NO: 323 |
| altOAC65 | SEQ ID NO: 132 | SEQ ID NO: 324 |
| altOAC66 | SEQ ID NO: 133 | SEQ ID NO: 325 |
| altOAC67 | SEQ ID NO: 134 | SEQ ID NO: 326 |
| altOAC68 | SEQ ID NO: 135 | SEQ ID NO: 327 |
| altOAC69 | SEQ ID NO: 136 | SEQ ID NO: 328 |
| altOAC70 | SEQ ID NO: 137 | SEQ ID NO: 329 |
| altOAC71 | SEQ ID NO: 138 | SEQ ID NO: 330 |
| altOAC72 | SEQ ID NO: 139 | SEQ ID NO: 331 |
| altOAC73 | SEQ ID NO: 140 | SEQ ID NO: 332 |
| altOAC74 | SEQ ID NO: 141 | SEQ ID NO: 333 |
| altOAC75 | SEQ ID NO: 142 | SEQ ID NO: 334 |
| altOAC76 | SEQ ID NO: 143 | SEQ ID NO: 335 |
| altOAC77 | SEQ ID NO: 144 | SEQ ID NO: 336 |
| altOAC78 | SEQ ID NO: 145 | SEQ ID NO: 337 |
| altOAC79 | SEQ ID NO: 146 | SEQ ID NO: 338 |
| altOAC80 | SEQ ID NO: 147 | SEQ ID NO: 339 |
| altOAC81 | SEQ ID NO: 148 | SEQ ID NO: 340 |
| altOAC82 | SEQ ID NO: 149 | SEQ ID NO: 341 |
| altOAC83 | SEQ ID NO: 150 | SEQ ID NO: 342 |
| altOAC84 | SEQ ID NO: 151 | SEQ ID NO: 343 |
| altOAC85 | SEQ ID NO: 152 | SEQ ID NO: 344 |
| altOAC86 | SEQ ID NO: 153 | SEQ ID NO: 345 |
| altOAC87 | SEQ ID NO: 154 | SEQ ID NO: 346 |
| altOAC88 | SEQ ID NO: 155 | SEQ ID NO: 347 |
| altOAC89 | SEQ ID NO: 156 | SEQ ID NO: 348 |
| altOAC90 | SEQ ID NO: 157 | SEQ ID NO: 349 |
| altOAC91 | SEQ ID NO: 158 | SEQ ID NO: 350 |
| altOAC92 | SEQ ID NO: 159 | SEQ ID NO: 351 |
| altOAC93 | SEQ ID NO: 160 | SEQ ID NO: 352 |
| altOAC94 | SEQ ID NO: 161 | SEQ ID NO: 353 |
| altOAC95 | SEQ ID NO: 162 | SEQ ID NO: 354 |
| altOAC96 | SEQ ID NO: 163 | SEQ ID NO: 355 |
| altOAC97 | SEQ ID NO: 164 | SEQ ID NO: 356 |
| altOAC98 | SEQ ID NO: 165 | SEQ ID NO: 357 |
| altOAC99 | SEQ ID NO: 166 | SEQ ID NO: 358 |
| altOAC100 | SEQ ID NO: 167 | SEQ ID NO: 359 |
| altOAC101 | SEQ ID NO: 168 | SEQ ID NO: 360 |
| altOAC102 | SEQ ID NO: 169 | SEQ ID NO: 361 |
| altOAC103 | SEQ ID NO: 170 | SEQ ID NO: 362 |
| altOAC104 | SEQ ID NO: 171 | SEQ ID NO: 363 |
| altOAC105 | SEQ ID NO: 172 | SEQ ID NO: 364 |
| altOAC106 | SEQ ID NO: 173 | SEQ ID NO: 365 |
| altOAC107 | SEQ ID NO: 174 | SEQ ID NO: 366 |
| altOAC108 | SEQ ID NO: 175 | SEQ ID NO: 367 |
| altOAC109 | SEQ ID NO: 176 | SEQ ID NO: 368 |
| altOAC110 | SEQ ID NO: 177 | SEQ ID NO: 369 |
| altOAC111 | SEQ ID NO: 178 | SEQ ID NO: 370 |
| altOAC112 | SEQ ID NO: 179 | SEQ ID NO: 371 |
| altOAC113 | SEQ ID NO: 180 | SEQ ID NO: 372 |
| altOAC114 | SEQ ID NO: 181 | SEQ ID NO: 373 |
| altOAC115 | SEQ ID NO: 182 | SEQ ID NO: 374 |
| altOAC116 | SEQ ID NO: 183 | SEQ ID NO: 375 |
| altOAC117 | SEQ ID NO: 184 | SEQ ID NO: 376 |
| altOAC118 | SEQ ID NO: 185 | SEQ ID NO: 377 |
| altOAC119 | SEQ ID NO: 186 | SEQ ID NO: 378 |
| csOAC | SEQ ID NO: 187 | SEQ ID NO: 379 |

[0065] In some embodiments, the nucleic acids are codon optimized to improve expression, e.g., using techniques as disclosed in U.S. Pat. No. 10,435,727. More specifically, optimized nucleotide sequences are generated based on a number of considerations: (1) For each amino acid of the recombinant polypeptide to be expressed, a codon (triplet of nucleotide bases) is selected based on the frequency of each codon in the Saccharomyces cerevisiae genome; the codon can be chosen to be the most frequent codon or can be selected probabilistically based on the frequencies of all possible codons. (2) In order to prevent DNA cleavage due to a restriction enzyme, certain restriction sites are removed by changing codons that cover those sites. (3) To prevent low-complexity regions, long repeats (sequences of any single base longer than five bases) are modified. (2) and (3) are performed recursively to ensure that codon modification does not lead to additional undesirable sequences. (4) A ribosome binding site is added to the N-terminus. (5) A stop codon is added.

[0066] In various embodiments, the nucleic acids further comprise additional nucleic acids encoding amino acids that are not part of the altOAC or PKSC enzyme. In some of these embodiments, the additional sequences encode additional amino acids present when the nucleic acid is translated, encoding, for example, an additional protein domain, with or without a linker sequence, creating a fusion protein. Other examples are localization sequences, i.e., signals directing the localization of the folded protein to a specific subcellular compartment or membrane.

[0067] In some embodiments, the nucleic acids have, at the 5′ end, a nucleic acid encoding codon optimized cofolding peptides to create a fusion protein, e.g., comprising SEQ ID NOs:188-192 (Table 2), joining the sequences together to form a fusion polypeptide, e.g., comprising the amino acid sequence of SEQ ID NO:380-384 fused at the N terminus of the enzyme polypeptide, generating recombinant fusion polypeptides.

TABLE 2

| | Codon Optimized | Amino Acid Sequence |
|---|---|---|
| NAME | Nucleic Acid Sequence | for Isolated Protein |
| MBP | SEQ ID NO: 188 | SEQ ID NO: 380 |
| VEN | SEQ ID NO: 189 | SEQ ID NO: 381 |
| MST | SEQ ID NO: 190 | SEQ ID NO: 382 |
| OSP | SEQ ID NO: 191 | SEQ ID NO: 383 |
| OLE | SEQ ID NO: 192 | SEQ ID NO: 384 |

[0068] Further provided are non-naturally occurring nucleic acids that encode an enzyme having the enzymatic activity of any of the non-naturally occurring altOAC or PKSC enzymes described above, or a naturally occurring enzyme having OAC activity. The nucleic acids may be codon optimized, e.g., for production in yeast.

[0069] In some embodiments, the nucleic acid comprises additional nucleotide sequences that are not translated. Nonlimiting examples include promoters, terminators, barcodes, Kozak sequences, targeting sequences, and enhancer elements. Particularly useful here are promoters that are functional in yeast.

[0070] Expression of a gene encoding an enzyme is determined by the promoter controlling the gene. In order for a gene to be expressed, a promoter must be present within 1,000 nucleotides upstream of the gene. A gene is generally cloned under the control of a desired promoter. The promoter regulates the amount of enzyme expressed in the cell and also the timing of expression, or expression in response to external factors such as sugar source.

[0071] Any promoter now known or later discovered can be utilized to drive the expression of the altOAC or PKSC genes described herein. See e.g. http://parts.igem.org/Yeast for a listing of various yeast promoters. Exemplary promoters listed in Table 3 below drive strong expression, constant gene expression, medium or weak gene expression, or inducible gene expression. Inducible or repressible gene expression is dependent on the presence or absence of a certain molecule. For example, the GAL1, GAL7, and GAL10 promoters are activated by the presence of the sugar galactose and repressed by the presence of the sugar glucose. The HO promoter is active and drives gene expression only in the presence of the alpha factor peptide. The HXT1 promoter is activated by the presence of glucose while the ADH2 promoter is repressed by the presence of glucose.

TABLE 3
Exemplary yeast promoters

| Strong | Medium and weak | Inducible/repressible |
|---|---|---|
| constitutive promoters | constitutive promoters | promoters |
| TEF1 | STE2 | GAL1 |
| PGK1 | TPI1 | GAL7 |
| PGI1 | PYK1 | GAL10 |
| TDH3 | | HO |
| | | HXT1 |
| | | ADH2 |

[0072] In various embodiments, the nucleic acid is in an expression cassette, e.g., a yeast expression cassette. Any yeast expression cassette capable of expressing the enzyme in a yeast cell can be utilized. In some embodiments, the expression cassette consists of a nucleic acid encoding an altOAC or PKSC with a promoter.

[0073] Additional regulatory elements can also be present in the expression cassette, including restriction enzyme cleavage sites, antibiotic resistance genes, integration sites, auxotrophic selection markers, origins of replication, and degrons.

[0074] The expression cassette can be present in a vector that, when transformed into a host cell, either integrates into chromosomal DNA or remains episomal in the host cell. Such vectors are well-known in the art. See e.g. http://parts.igem.org/Yeast for a listing of various yeast vectors.

[0075] A nonlimiting example of a yeast vector is a yeast episomal plasmid (YEp) that contains the pBluescript II SK(+) phagemid backbone, an auxotrophic selectable marker, yeast and bacterial origins of replication and multiple cloning sites enabling gene cloning under a suitable promoter (see Table 3). Other exemplary vectors include pRS series plasmids.

### Host Cells

[0076] The present invention is also directed to genetically engineered host cells that comprise the above-described nucleic acids. Such cells may be, e.g., any species of filamentous fungus, including but not limited to any species of Aspergillus, which have been genetically altered to produce precursor molecules, intermediate molecules, or cannabinoid molecules. Host cells may also be any species of bacteria, including but not limited to Escherichia, Corynebacterium, Caulobacter, Pseudomonas, Streptomyces, Bacillus, or Lactobacillus.

[0077] In some embodiments, the genetically engineered host cell is a yeast cell, which may comprise any of the above-described expression cassettes, and capable of expressing the recombinant altOAC or PKSC enzyme encoded therein.

[0078] Any yeast cell capable of being genetically engineered can be utilized in these embodiments. Nonlimiting examples of such yeast cells include species of Saccharomyces, Candida, Pichia, Schizosaccharomyces, Scheffersomyces, Blakeslea, Rhodotorula, or Yarrowia.

[0079] These cells can achieve gene expression controlled by inducible promoter systems; natural or induced mutagenesis, recombination, and/or shuffling of genes, pathways, and whole cells performed sequentially or in cycles; overexpression and/or deletion of single or multiple genes and reducing or eliminating parasitic side pathways that reduce precursor concentration.

[0080] The host cells of the recombinant organism may also be engineered to produce any or all precursor molecules necessary for the biosynthesis of cannabinoids, including but not limited to olivetol (OL), farnesyl diphosphate (FPP) and geranyl diphosphate (GPP), hexanoic acid and hexanoyl-CoA, malonic acid and malonyl-CoA, dimethylallylpyrophosphate (DMAPP) and isopentenylpyrophosphate (IPP) as disclosed in U.S. Pat. No. 10,435,727.

[0081] The gene encoding the enzyme can be cloned into vectors with the proper regulatory elements for gene expression (e.g. promoter, terminator) and the derived plasmid can be confirmed by DNA sequencing. As an alternative to expression from an episomal plasmid, the gene encoding the enzyme may be inserted into the recombinant host genome. Integration may be achieved by a single or double cross-over insertion event of a plasmid, or by nuclease-based genome editing methods, as are known in the art e.g. CRISPR, TALEN and ZFR. Strains with the integrated gene can be screened by rescue of auxotrophy and genome sequencing. See, e.g., Green and Sambrook (2012).

[0082] To produce the desired cannabinoid, each candidate polypeptide may be introduced into a host cell genetically modified to contain all necessary components for cannabinoid biosynthesis using standard yeast cell transformation techniques (Green and Sambrook, 2012), e.g., other enzymes in the cannabinoid biosynthetic pathway such as PKS, geranyl pyrophosphate synthase (see, e.g., U.S. Provisional Patent Application 63/141,486), prenyltransferase (see, e.g., U.S. Provisional Patent Application 63/053,539), and the enzymes described in U.S. Provisional Patent Application 63/164,126. Cells are subjected to fermentation under conditions that activate the promoter controlling the candidate polypeptide (see, e.g., Table 2). The broth may be subsequently subjected to HPLC analysis.

[0083] In some embodiments, for recombinant enzyme purification, the gene encoding the enzyme is cloned into an expression vector such as the pET expression vectors from Novagen, transformed into a protease deficient strain of E. coli such as BL21 and expressed by induction with IPTG. The protein of interest may be tagged with a common tag to facilitate purification, e.g. hexahistidine, GST, calmodulin, TAP, AP, CAT, HA, FLAG, MBP etc. Coexpression of a bacterial chaperone such as dnaK, GroES/GroEL or SecY may help facilitate protein folding. See Green and Sambrook (2012).

### Methods

[0084] The present invention is also directed to a method of converting a polyketide (I) into a resorcyclic acid derivative (II), where R₁=CH₃, CH₂CH₃, (CH₂)₂CH₃, (CH₂)₃CH₃, (CH₂)₄CH₃, (CH₂)₅CH₃, or (CH₂)₆CH₃,

[chemical structure]

The method comprises contacting the polyketide with any of the olivetolic acid cyclase (OAC) enzymes described herein in a manner and for a time sufficient to convert the polyketide (I) into the resorcyclic acid derivative (II).

[0085] In some embodiments, the method is carried out in vitro (outside of a cell). In other embodiments, the polyketide and the OAC enzyme are present in a living microorganism, for example any of the recombinant host cells described above, such as a yeast cell. In various embodiments, the recombinant host cell can further convert the resorcyclic acid derivative into a cannabinoid, and/or synthesize the polyketide from precursors.

[0086] In various specific embodiments, samples from fermentations of recombinant hosts expressing the cannabinoid pathway with fungal olivetolic acid cyclases outlined above are: (i) prepared and extracted using a combination of fermentation, dissolution, and purification steps; and (ii) analyzed by HPLC for the presence of directing molecules, precursor molecules, intermediate molecules, and target molecules such as OA, OL and common variants.

[0087] In various embodiments, the host cells are provided with various feedstocks to drive production of the desired ergolines, e.g., glucose, fructose, sucrose, galactose, raffinose, maltose, ethanol, xylose, fatty acids, glycerol, acetate, molasses, malt syrup, corn steep liquor, dairy, flour, protein powder, olive mill waste, fish waste, etc. for example as discussed in U.S. patent application Ser. No. 17/068,636.

[0088] In various embodiments, an inducer is used to activate the expression of the OAC pathway, such as the expression of altOAC or PKSC, or a combination of PKSC genes, or a combination of the cannabis OAC, csOAC, with altOAC and PKSC genes. Inducers include: galactose, glycerol, sucrose, maltose, lactose, glucose, hexanoic acid, hexanol, butyric acid, butanol, tributyrin, xylose, copper, and/or zinc.

[0089] In some embodiments, a vitamin mixture is added to a fermentation. Such as mixture can contain: choline chloride, niacin, pyridoxine hydrochloride, riboflavin, calcium pantothenate, para-aminobenzoic acid (PABA), thiamine HCL, biotin, cyanocobalamin, and/or folic acid, and mineral mixes, which can include calcium chloride dihydrate, ferrous sulfate heptahydrate, manganese (II) sulfate monohydrate, copper sulfate pentahydrate, zinc sulfate heptahydrate, magnesium chloride, and solutes, such as glycerol, up to 10% v/v. Since these are oxidoreductase reactions, they may be stimulated by changing the redox potential of the culture. This can be accomplished by addition of oxidants such as H₂O₂, sulfuric acid (H2SO4), nitric acid (HNO3), potassium permanganate (KMnO4), and/or Fenton's reagent, antioxidants such as ascorbic acid, butylated hydroxyanisole (BHA), and/or butylated hydroxytoluene (BHT), or reductants such as 2-Mercaptoethanol (B-ME), dithiothreitol (DTT), glutathione, cysteine hydrochloride, and/or tris(2-carboxyethyl)phosphine (TCEP)

[0090] The following enumerated embodiments are representative of the invention:

[0091] 1. An olivetolic acid cyclase (OAC) enzyme derived from a microorganism or a non-Cannabis plant, wherein the enzyme catalyzes cyclization of a polyketide (I) into a resorcyclic acid derivative (II), where R₁=CH₃, CH₂CH₃, (CH₂)₂CH₃, (CH₂)₃CH₃, (CH₂)₄CH₃, (CH₂)₅CH₃, or (CH₂)₆CH₃, wherein (I) and (II) have the following structural formulas:

[chemical structure]

[0092] 2. The enzyme of embodiment 1, wherein the microorganism is a bacterium or a fungus.

[0093] 3. The enzyme of embodiment 1, comprising one or more mutations that increase specificity for particular R₁ alkyl chain length.

[0094] 4. The enzyme of any one of embodiments 1-3, having an amino acid sequence that has less than 50% homology to the sequence set forth in SEQ ID NO: 379.

[0095] 5. The enzyme of any one of embodiments 1-3, having an amino acid sequence that that is at least 95% identical to any one of the sequences set forth in SEQ ID NO: 193-SEQ ID NO: 378.

[0096] 6. The enzyme of any one of embodiments 1-3, having an amino acid sequence that that is at least 50% identical to the sequence set forth in either SEQ ID NO: 385 or SEQ ID NO: 386.

[0097] 7. The enzyme of any one of embodiments 1-3, having an amino acid sequence that that is at least 20% identical to the sequence set forth in SEQ ID NO: 334.

[0098] 8. The enzyme of any one of embodiments 1-3, having an amino acid sequence that that is at least 50% identical to any one of the sequences set forth in SEQ ID NO: 193-SEQ ID NO: 195.

[0099] 9. The enzyme of any one of embodiments 1-3, wherein the catalysis of the polyketide cyclization is by a mechanism selected from the group consisting of C2-C7 aldol condensation, Diekmann condensation, Claisen condensation, and Knoevenagel condensation.

[0100] 10. An isolated nucleic acid encoding the enzyme of any one of embodiments 1-9.

[0101] 11. The isolated nucleic acid of embodiment 10, which is codon optimized for production in yeast.

[0102] 12. The codon-optimized nucleic acid of embodiment 11, inserted in a vector configured for replication and protein expression in yeast cells.

[0103] 13. The isolated nucleic acid of any one of embodiments 10-12, having a nucleic acid sequence that is at least 95% identical to a sequence selected from the group consisting of SEQ ID NO: 1-SEQ ID NO: 186.

[0104] 14. An expression cassette comprising the isolated nucleic acid of any one of embodiments 10-13.

[0105] 15. The expression cassette of embodiment 14, which is a yeast expression cassette.

[0106] 16. The expression cassette of embodiment 14 or embodiment 15, further comprising a nucleic acid fragment at the 5′ end of the isolated nucleic acid, wherein the nucleic acid fragment encodes a codon optimized cofolding peptide.

[0107] 17. The expression cassette of embodiment 16, wherein the codon optimized cofolding peptide has an amino acid sequence that is at least 95% identical to a sequence selected from the group consisting of SEQ ID NO: 380-384.

[0108] 18. A recombinant microorganism comprising the expression cassette of any one of embodiments 14-17, that expresses the engineered OAC enzyme encoded therein.

[0109] 19. The recombinant microorganism of embodiment 18, which is a yeast cell.

[0110] 20. The yeast cell of embodiment 19, which is a species of Saccharomyces, Candida, Pichia, Schizosaccharomyces, Scheffersomyces, Blakeslea, Rhodotorula, Aspergillus or Yarrowia.

[0111] 21. The recombinant microorganism of any one of embodiments 18-20, further expressing at least one other enzyme in a cannabinoid biosynthetic pathway.

[0112] 22. The recombinant microorganism of embodiment 21, wherein the at least one other enzyme is an OAC enzyme having an amino acid sequence that is at least 80% identical to the sequence set forth in SEQ ID NO: 379.

[0113] 23. The recombinant microorganism of embodiment 21, wherein the at least one other enzyme is a polyketide synthase or a prenyltransferase.

[0114] 24. The recombinant microorganism of any one of embodiments 21-23, capable of synthesizing a cannabinoid.

[0115] 25. The recombinant microorganism of any one of embodiments 21-24, which is a yeast cell.

[0116] 26. A method of converting a polyketide (I) into a resorcyclic acid derivative (II), where R₁=CH₃, CH₂CH₃, (CH₂)₂CH₃, (CH₂)₃CH₃, (CH₂)₄CH₃, (CH₂)₅CH₃, or (CH₂)₆CH₃, wherein (I) and (II) have the following structural formulas:

[chemical structure]

and wherein the method comprises contacting the polyketide with the olivetolic acid cyclase (OAC) enzyme of any one of embodiments 1-10 in a manner and for a time sufficient to convert the polyketide (I) into the resorcyclic acid derivative (II).

[0117] In preferred embodiments of the method, the olivetolic acid cyclase (OAC) enzyme catalyzes cyclization of the polyketide by a mechanism selected from the group consisting of C2-C7 aldol condensation, Diekmann condensation, Claisen condensation, and Knoevenagel condensation.

[0118] 27. The method of embodiment 26, wherein the polyketide and the OAC enzyme are in vitro.

[0119] 28. The method of embodiment 26, wherein the polyketide and the OAC enzyme are present in a living microorganism.

[0120] 29. The method of embodiment 28, wherein the living microorganism is the recombinant microorganism of any one of embodiments 18-25.

[0121] 30. The method of embodiment 29, wherein the living microorganism is the yeast cell of embodiment 25, and wherein the resorcyclic acid derivative is converted into a cannabinoid in the yeast cell.

### REFERENCES

[0122] Abbott et al., 1977, Experientia 33:718-720.
[0123] Carvalho et al., 2017, FEMS Yeast Res. 17:fox037.
[0124] Committee on the Health Effects of Marijuana, 2017, The Health Effects of Cannabis and Cannabinoids: The Current State of Evidence and Recommendations for Research, National Academies Press.
[0125] Gagne et al., 2012, Proc. Natl. Acad. Sci. USA 109:12811-12816.
[0126] Green and Sambrook, 2012, Molecular Cloning: A Laboratory Manual (Fourth Edition), Cold Spring Harbor Laboratory Press, Cold Spring Harbor, N.Y.
[0127] Gülck and Møller, 2020, Trends in Plant Science 25:985-1004.
[0128] Herbst et al., 2018, Nat. Prod. Rep. 35:1046.
[0129] Luo et al., 2019, Nature 567:123-126.
[0130] Okorafor, Ikechukwu C., Mengbin Chen, and Yi Tang. “High-Titer Production of Olivetolic Acid and Analogs in Engineered Fungal Host Using a Nonplant Biosynthetic Pathway.” ACS synthetic biology 10.9 (2021): 2159-2166
[0131] Shen, B., 2003, Current Opinion in Chemical Biology 7:285-295.
[0132] Yang et al., 2016, FEBS J. 283:1088-1106.
[0133] U.S. Pat. No. 10,435,727.
[0134] U.S. Pat. No. 10,671,632.
[0135] U.S. Pat. No. 9,765,308 B2
[0136] U.S. Pat. No. 11,028,417
[0137] U.S. Pat. No. 10,988,785
[0138] U.S. Pat. No. 11,041,002
[0139] U.S. Pat. No. 10,837,031
[0140] U.S. Pat. No. 11,293,038
[0141] U.S. patent application Ser. No. 17/068,636.
[0142] U.S. Provisional Patent Application 63/035,692.
[0143] U.S. Provisional Patent Application 63/053,539.
[0144] U.S. Provisional Patent Application 63/141,486.
[0145] U.S. Provisional Patent Application 63/164,126.
[0146] US Patent Application Publication 2020/0063170.
[0147] US Patent Application Publication 2020/0063171.

[0148] In view of the above, it will be seen that several objectives of the invention are achieved and other advantages attained.

[0149] As various changes could be made in the above methods and compositions without departing from the scope of the invention, it is intended that all matter contained in the above description and shown in the accompanying drawings shall be interpreted as illustrative and not in a limiting sense.

[0150] All references cited in this specification, including but not limited to patent publications and non-patent literature, and references cited therein, are hereby incorporated by reference. The discussion of the references herein is intended merely to summarize the assertions made by the authors and no admission is made that any reference constitutes prior art. Applicants reserve the right to challenge the accuracy and pertinence of the cited references.

[0151] As used herein, in particular embodiments, the terms “about” or “approximately” when preceding a numerical value indicates the value plus or minus a range of 10%. Where a range of values is provided, it is understood that each intervening value, to the tenth of the unit of the lower limit unless the context clearly dictates otherwise, between the upper and lower limit of that range and any other stated or intervening value in that stated range is encompassed within the disclosure. That the upper and lower limits of these smaller ranges can independently be included in the smaller ranges is also encompassed within the disclosure, subject to any specifically excluded limit in the stated range. Where the stated range includes one or both of the limits, ranges excluding either or both of those included limits are also included in the disclosure.

[0152] The indefinite articles “a” and “an,” as used herein in the specification and in the embodiments, unless clearly indicated to the contrary, should be understood to mean “at least one.”

[0153] The phrase “and/or,” as used herein in the specification and in the embodiments, should be understood to mean “either or both” of the elements so conjoined, i.e., elements that are conjunctively present in some cases and disjunctively present in other cases. Multiple elements listed with “and/or” should be construed in the same fashion, i.e., “one or more” of the elements so conjoined. Other elements can optionally be present other than the elements specifically identified by the “and/or” clause, whether related or unrelated to those elements specifically identified. Thus, as a non-limiting example, a reference to “A and/or B”, when used in conjunction with open-ended language such as “comprising” can refer, in one embodiment, to A only (optionally including elements other than B); in another embodiment, to B only (optionally including elements other than A); in yet another embodiment, to both A and B (optionally including other elements); etc.

[0154] As used herein in the specification and in the embodiments, “or” should be understood to have the same meaning as “and/or” as defined above. For example, when separating items in a list, “or” or “and/or” shall be interpreted as being inclusive, i.e., the inclusion of at least one, but also including more than one, of a number or list of elements, and, optionally, additional unlisted items. Only terms clearly indicated to the contrary, such as “only one of” or “exactly one of,” or, when used in the embodiments, “consisting of,” will refer to the inclusion of exactly one element of a number or list of elements. In general, the term “or” as used herein shall only be interpreted as indicating exclusive alternatives (i.e. “one or the other but not both”) when preceded by terms of exclusivity, such as “either,” “one of” “only one of” or “exactly one of.” “Consisting essentially of,” when used in the embodiments, shall have its ordinary meaning as used in the field of patent law.

[0155] As used herein in the specification and in the embodiments, the phrase “at least one,” in reference to a list of one or more elements, should be understood to mean at least one element selected from any one or more of the elements in the list of elements, but not necessarily including at least one of each and every element specifically listed within the list of elements and not excluding any combinations of elements in the list of elements. This definition also allows that elements can optionally be present other than the elements specifically identified within the list of elements to which the phrase “at least one” refers, whether related or unrelated to those elements specifically identified. Thus, as a non-limiting example, “at least one of A and B” (or, equivalently, “at least one of A or B,” or, equivalently “at least one of A and/or B”) can refer, in one embodiment, to at least one, optionally including more than one, A, with no B present (and optionally including elements other than B); in another embodiment, to at least one, optionally including more than one, B, with no A present (and optionally including elements other than A); in yet another embodiment, to at least one, optionally including more than one, A, and at least one, optionally including more than one, B (and optionally including other elements); etc.

### EXAMPLES

[0156] The following examples are offered to illustrate but not to limit the methods, compositions, and uses provided herein. Certain aspects of the present invention, including, but not limited to, methods for producing cannabinoid compounds in microorganisms, such as yeast cells, were disclosed in the earlier published patents and patent publications U.S. Pat. Nos. 10,435,727; 10,671,632; 9,765,308; 11,028,417; 10,988,785; 11,041,002; 10,837,031, 11,293,038; 2020/0063170; 2020/0063171, the contents of which are incorporated herein by reference in its entirety.

### Example 1. Method of Growth

[0157] Modified host cells that produce olivetolic acid (OA), and/or divarinic acid, and downstream cannabinoid compounds, such as the altOAC- and PKSC-expressing strains disclosed herein, express engineered altOAC or PKSC biosynthesis genes and enzymes, singly or in combination. Combining two or more altOAC- or PKSC-expressing genes in a microorganism can increase yields of production of OA, divarinic acid, and downstream cannabinoid compounds. More specifically, the OA-producing strain herein is grown in a minimal, complete culture media containing yeast nitrogen base, amino acids, vitamins, ammonium sulfate, and a carbon source of glucose and galactose. The recombinant host cells are grown in 24-well plates or shake flasks in a volume range of 2 mL to 100 mL of media starting from an inoculation density of OD600 nm=1. The strains herein can be harvested during a fermentation period ranging from 12 hours onward from the start of pathway enzyme induction.

### Example 2. Expression of altOAC and PKSC in a Modified Host Organism

[0158] Construction of the Saccharomyces OA and cannabinoid is carried out via expression of the altOAC or PKSC genes, singly, or co-expressed with genes which encode the downstream cannabinoid enzymes which can consume olivetolic acid or divarinic acid to produce cannabigerolic acid or cannabigerovarinic acid, as described in synthase in a GPP-production host as described in PCT/US21/42090 filed on Jul. 16, 2021, and in the U.S. Provisional Patent Application No. 63/553,539. AltOAC and PKSC genes encode the enzymes that synthesize olivetolic acid or divarinic acid which serve as a precursor for synthesis of valuable cannabinoids. In particular, they serve as a prenyl acceptor for a cannabinoid prenyltransferase, which combines the prenyl acceptor with a prenyl donor, such geranyl-pyrophsphate (GPP), farnesyl pyrophosphate (FPP), and/or geranylgeranyl-pyrophosphate (GGPP). Recombinant genes for producing prenyl donors can be co-expressed with altOAC and PKSC genes, alongside with cannabinoid enzymes, as described in PCT/US22/13857 and in the U.S. Provisional Patent Application No. 63/141,486. The optimized altOAC and pKASC genes described herein are synthesized using DNA synthesis techniques known in the art. The optimized genes can be cloned into vectors with the proper regulatory elements for gene expression (e.g. promoter, terminator) and the derived plasmid can be confirmed by DNA sequencing. As an alternative to expression from an episomal plasmid, the optimized altOAC and PKSC genes are inserted into the recombinant host genome. Integration is achieved by a single cross-over insertion event of the plasmid. Strains with the integrated gene can be screened by rescue of auxotrophy and genome sequencing.

### Example 3. Expression of Recombinant Multiple altOAC and/or PKSC Genes in a Modified Host Organism

[0159] Construction of Saccharomyces cerevisiae altOAC and/or PKSC production strains is carried out via expression of 1) an altOAC gene in combination with the cannabis OAC csOAC, 2) a PKSC1A-PKSC20A genes with a PKSC1B-PKSC25B gene with a PKSC1C-PKSC27C gene, 3) a PKSC1A-PKSC20A genes with a PKSC1B-PKSC25B gene, 4) a PKSC1A-PKSC20A genes with a PKSC1B-PKSC25B gene with a PKSC1C-PKSC27C gene with the recombinant cannabis OAC csOAC gene, 5) a PKSC1C-PKSC27C gene, or 6) the recombinant cannabis OAC, csOAC, coexpressed with a PKSC1C-PKSC27C gene. The optimized altOAC, csOAC, and PKSC genes are synthesized using DNA synthesis techniques known in the art. The optimized gene can be cloned into vectors with the proper regulatory elements for gene expression (e.g. promoter, terminator) and the derived plasmid can be confirmed by DNA sequencing. Plasmids can be constructed to contain multiple expression cassettes to encode multiple genes on a single plasmid by methods known to those skilled in the art. As an alternative to expression from an episomal plasmid, the optimized combination of genes is inserted into the recombinant host genome. Integration is achieved by a single cross-over insertion event of the plasmid. Strains with the integrated gene can be screened by rescue of auxotrophy and genome sequencing.

### Example 4. Detection of Isolated Product

[0160] To identify fermentation-derived olivetolic acid, divarinic acid, olivetol, divarinol, their precursors, downstream cannabinoids, and all other products of a recombinant host expressing an engineered biosynthetic pathway for OA and cannabinoids, an Agilent 1100 series liquid chromatography (LC) system equipped with a reverse phase C18 column (Agilent Eclipse Plus C18, Santa Clara, CA, USA) is used. A gradient is used of mobile phase A (ultraviolet (UV) grade H2O+0.1% formic acid) and mobile phase B (UV grade acetonitrile+0.1% formic acid). Column temperature is set at 30° C. Compound absorbance is measured at 210 nm and 305 nm using a diode array detector (DAD) and spectral analysis from 200 nm to 400 nm wavelengths. A 0.1 mg/mL analytical standard is made from certified reference material for each compound (Cayman Chemical Company, USA). Each sample is prepared by diluting fermentation biomass from a recombinant host expressing the engineered biosynthesis pathway 1:3 or 1:20 in 100% acetonitrile and filtered in 0.2 um nanofilter vials. The retention time and UV-visible absorption spectrum (i.e., spectral fingerprint) of the samples are compared to the analytical standard retention time and UV-visible spectra (i.e. spectral fingerprint) when identifying the olivetolic acid and related compounds mentioned above. Examples of results from the detection of isolated cannabinoid products via fermentation of recombinant host organisms are shown in FIG. 4 and FIG. 6.

### Example 5. Production of Olivetolic Acid (OA) with Expression Alternative OACs (altOACs and/or PKSCs) in a Modified Host Organism

[0161] Cyclase genes such as the altOACs and PKSCs described herein can be expressed in a modified Saccharomyces cerevisiae host cell to yield cannabinoid precursors, such as olivetolic acid and divarinic acid. Construction of a modified host cell expressing a cyclase such as the altOACs, and/or PKSCs can be accomplished by transforming a microorganism such as a modified Saccharomyces cerevisiae via chemical transformation of episomal plasmids containing the gene cassettes encoding cyclases such as altOAC and/or PKSCs. Such plasmid transformation protocols are known by those skilled in the art. Such transformation procedures include chemical transformations or electroporation via mixtures of plasmids and the host microorganism.

[0162] FIG. 4 depicts the identification of the cannabinoid precursor, olivetolic acid (OA) in a Saccharomyces cerevisiae host cell expressing either recombinant cannabis OAC or an altOAC. Detection of OA in recombinant host cells expressing the cannabis OAC or altOAC were compared against a negative control host cell which did not express cyclases. Cyclase genes expressed in a recombinant host capable of generating cannabinoids precursors were isolated and identified as described in Example 4. Standard yeast fermentation procedures known to those skilled in the art were carried out. Fermentations were carried out over 48 hrs at 30 Celsius shaking at 250 rpm. Fermentation media included components known to those skilled in the art for growing Saccharomyces cerevisiae, including nitrogen and carbon sources to support yeast growth. Such methods have also been described in application 62/914,404. In addition, the fermentation media contained 10 mM phosphate buffer, 10 mM MgCl2, 15 g/L ammonium sulfate, and 4% glucose. Samples were processed as described in Example 4.

### Example 6. Production of Cannabinoids with Expression of a Recombinant Cannabis OAC (csOAC) with and without Alternative OACs (altOACs and/or PKSCs) in a Modified Host Organism

[0163] Cyclase genes such as the altOACs and PKSCs described herein can be expressed singly or in combination to yield cannabinoids such as cannabigerolic acid (CBGA). Construction of a modified Saccharomyces cerevisiae with OACs, altOACs, and/or PKSCs can be accomplished by transforming a microorganism such as a modified Saccharomyces cerevisiae via chemical transformation of episomal plasmids containing the gene cassettes encoding cyclases such as altOAC and/or PKSCs. Such plasmid transformation protocols are known by those skilled in the art. Such transformation procedures include chemical transformations or electroporation via mixtures of plasmids and the host microorganism. When the modified host strain expresses downstream genes of the cannabinoid biosynthesis pathway, such as a CBGA synthase, including those genes described in application US21/42090, the cyclase product, stemming from the cyclases disclosed, including the altOAC and/or PKSCs, is consumed by a CBGA synthase to yield the cannabinoid CBGA.

[0164] FIG. 6 depicts the quantification of the cannabinoid CBGA generated by expressing cyclases in a Saccharomyces cerevisiae expressing downstream cannabinoid synthases. Cyclase genes expressed in a recombinant host capable of generating downstream cannabinoids yield CBGA, isolated and identified as in Example 4. Modified host organisms either expressed a recombinant cannabis cyclase, csOAC, alone, or in combination with additional PKSC enzymes. Standard yeast fermentation procedures known to those skilled in the art were carried out. Fermentations were carried out over 48 hrs at 30 Celsius shaking at 250 rpm. Fermentation media included components known to those skilled in the art for growing Saccharomyces cerevisiae, including nitrogen and carbon sources to support yeast growth. Such methods have also been described in U.S. patent application Ser. No. 17/068,636. In addition, the fermentation media contained 10 mM phosphate buffer, 10 mM MgCl2, 15 g/L ammonium sulfate, and 4% glucose. Samples were processed as described in Example 4. The cannabinoid CBGA yield was greater with combinatorial expression of alternative cyclases, such as PKSC26 and PKSC27 depicted in FIG. 6. Combinatorial expression of cyclases yielded 1.5 or 2.9× the relative amount of CBGA compared to a single cyclase, a recombinant cannabis cyclase, csOAC.

What is claimed is:

1. An engineered olivetolic acid cyclase (OAC) enzyme derived from a microorganism or a non-Cannabis plant, wherein the enzyme catalyzes cyclization of a polyketide (I) into a resorcyclic acid derivative (II), where R₁=CH₃, CH₂CH₃, (CH₂)₂CH₃, (CH₂)₃CH₃, (CH₂)₄CH₃, (CH₂)₅CH₃, or (CH₂)₆CH₃,

[chemical structure]

2. The enzyme of claim 1, comprising one or more mutations that increase specificity for particular R₁ alkyl chain length.

3. The enzyme of claim 1, having an amino acid sequence that has less than 50% homology to the sequence set forth in SEQ ID NO: 379.

5. The enzyme of claim 1, having an amino acid sequence that that is at least 95% identical to any one of the sequences set forth in SEQ ID NO: 193-SEQ ID NO: 378.

6. The enzyme of claim 1, having an amino acid sequence that that is at least 50% identical to the sequence set forth in either SEQ ID NO: 385 or SEQ ID NO: 386.

7. The enzyme of claim 1, having an amino acid sequence that that is at least 20% identical to the sequence set forth in SEQ ID NO: 334.

8. The enzyme of claim 1, having an amino acid sequence that that is at least 50% identical to any one of the sequences set forth in SEQ ID NO: 193-SEQ ID NO: 195.

9. An isolated nucleic acid encoding the enzyme of claim 1.

10. The isolated nucleic acid of claim 9, which is codon optimized for production in yeast.

11. The codon-optimized nucleic acid of claim 10, inserted in a vector configured for replication and protein expression in yeast cells.

12. The isolated nucleic acid of claim 9, having a nucleic acid sequence that is at least 95% identical to a sequence selected from the group consisting of SEQ ID NO: 1-SEQ ID NO: 186.

13. An expression cassette comprising the isolated nucleic acid of claim 9.

14. The expression cassette of claim 13, which is a yeast expression cassette.

15. The expression cassette of claim 14, further comprising a nucleic acid fragment at the 5′ end of the isolated nucleic acid, wherein the nucleic acid fragment encodes a codon optimized cofolding peptide having an amino acid sequence that is at least 95% identical to a sequence selected from the group consisting of SEQ ID NO: 380-384.

16. A recombinant microorganism comprising the expression cassette of claim 13, that expresses the engineered OAC enzyme encoded therein.

17. The recombinant microorganism of claim 16, which is a yeast cell, which is a species of Saccharomyces, Candida, Pichia, Schizosaccharomyces, Scheffersomyces, Blakeslea, Rhodotorula, Aspergillus or Yarrowia.

18. The recombinant microorganism of claim 16, further expressing at least one other enzyme in a cannabinoid biosynthetic pathway.

19. The recombinant microorganism of claim 18, wherein the at least one other enzyme is an OAC enzyme having an amino acid sequence that is at least 80% identical to the sequence set forth in SEQ ID NO: 379.

20. The recombinant microorganism of claim 18, wherein the at least one other enzyme is a polyketide synthase or a prenyltransferase.

21. The recombinant microorganism of claim 18, capable of synthesizing a cannabinoid.

22. The recombinant microorganism of claim 18, which is a yeast cell.

23. A method of converting a polyketide (I) into a resorcyclic acid derivative (II), where R₁=CH₃, CH₂CH₃, (CH₂)₂CH₃, (CH₂)₃CH₃, (CH₂)₄CH₃, (CH₂)₅CH₃, or (CH₂)₆CH₃, [chemical structure]
the method comprising contacting the polyketide with the olivetolic acid cyclase (OAC) enzyme of claim 1 in a manner and for a time sufficient to convert the polyketide (I) into the resorcyclic acid derivative (II).

24. The method of claim 23, wherein the olivetolic acid cyclase (OAC) enzyme of claim 1 catalyzes cyclization of the polyketide by a mechanism selected from the group consisting of C2-C7 aldol condensation, Diekmann condensation, Claisen condensation, and Knoevenagel condensation.

25. The method of claim 23, wherein the polyketide and the OAC enzyme are present in the recombinant microorganism of claim 16.

26. The method of claim 25, wherein the recombinant microorganism is the yeast cell of claim 22, and wherein the resorcyclic acid derivative is converted into a cannabinoid in the yeast cell.

The application's sequence listing, which the Patent Office published only in electronic form, follows.

SEQUENCE LISTING (386 sequences)

SEQ ID NO: 1 - DNA, 7551 bp, Artificial Sequence
  PKSC1A
atgagtagtcaggcccctgctccatctcgtgacgatattgccgtggtgggcttgagctgcaggttcccaggtgaggcagacacggcggagcatttttgggattttatatgtaatggcaggaacgcctactcagaaaatcccgacagatggacgcctgacgcgttccactatggggagaaaaaaattaatacatcactaccgagaggaggacattttatgaagcaggacgttgcggctttcgacgcaaactttttcaatctttcaaaagtcgaagccgaaagtatggaccctcaacaaaggataataatggaggtcacatacgagtctatggagagtgcgggtttaagagtcgaccaattggcgggaagtcgtactggcgtgttcatggcttccttcacgtccgattatagagaaatgctatatcgtgatgcagagacagcgcctctatacactgcaacggggaccagcaacacatccacctccaatagggtttcctggttctttgatttgcgtggaccgagctttacagtcaatactgcgtgcagttcaagtctggttgcgtgccacttggcatgccagtccctgtggtcaggtgagacggagagtgcaatagttgggggcactagcttacttctaaatcccgacatgttcctttatttatctaaccaacagttcttagcgcctgacggtcagtgtaaatcatttgatgaaagcggcgatggctacgctaggggagacggaatcggcgttgttatattgaagcgtgtagcagatgcccttagagatggtgaccctataagagctgtcataaggggttctgggtgcaatcaggacggccacacgaaggggttcactataccaagcgtagaggcgcaagctagcttgatagccgaaacttaccgtaatgcaggtcttagcctagctgagacacgttacgtagaggcgcatggtacaggcactcaagctggcgacaccagagagatggagggaatcgccaggacctttagtcaacacagaactgcgagcgatgaactgttggtcggcagcgtgaaagcaaacattggacatcttgaggcctgtgcgggattagccagtttgattaaatgtgtctacatattagagacaggcgttataccacctacgccttcagtgcgtgtcttgaacccaaagatccgttgggaggaatggcacctaaaggtaccagcaactcagactatctggccgaccgagggattaaggagaatatccacgcaaggctttggttacgggggaacaaacgcccacttaatcttggacgacgcagcacactatcttgaggctagaaaacttagaggccaccattacactaggacccatccgcaaaccaggaggcttttgacttctgccatgcacgaggccgtctctaacgaccaaccacctaggttgttcctgttccgtgcgaacgacagagagggtctgggcagggtacgttcttccctagcgcaacacctagagcaactgttgaaatcatggcctcaagacagtagagacggcggcgcgtatctacacaatctggcgtttactcttgcaagtcgtcgtagtcacttacagtggcagacatatgccacagcaagcacaccgtctgaactattgcaagcacttcaacatgaaggaggcgcttgggcggcaccggaaaccaggcttgctgcatccccacccagacttggctttatttttacagggcagggtgctcaatgggctagaatgggtgtggaactgatggcttatccagtcttcagacaatctgtggaggctagcgacgaattcctaagatctgcgttgggttgtccctggagtgcggtagatgaactggcaaaacctcccgctacatcccgtttatctgaagcggcttattctcaaacgctgtgtacggttcttcaaatagcgacggtagaccttttggaggattggaacgtctgccctacgagagtcgcgggtcacagtagcggagaaatagctgctgcttactgcctaggggccctgaccaagcatgacagtttaagagtcgcatattatcgtggaattctgagctctgagatgcagcagacgcatggagatcgtaaaggggctatgatggctgtgggggccagccccgaggaagtggaggcatggttagctaaacttactagaggcagggtagtggtagcttgcataaacagtccgacgtcagtcacggccagcggtgatgcagcgggtatagacgaattactagctatggttcagcaagcaggggtattcggcaggaaactgcaggtcgacgtggcatatcatagccaccacatgcaatcagtgtcttccgcttatgccgaacttcttaaagaccttgcgcccctacccgcgagacccggcaggaccatgcatagttctgttttgggaagggtcattgatgccgcagagttggggtccagtaactgggtgcaaaatttggtatcccccgttcgtttctccgaggcggtcagttctctattgtcagctggtgataagcccgcagttgatgtgcttgttgagatcggccctcacgcagcactaaaaggccctgttcaacagatacttcaggctcagggtgtctccgcagtaaaatacacttccgtgctatcacgtggccagtctgccgttaagaccgctcttgcgtgcgccggggagctggttttaagttcagttccggtagccatgtcccgtgtcaatttagagagtgggcctccccccagtccgcttgtagatttaccgccttatccgtggaacagatccactagattttgggcagagagcagattgtcaagagaataccgtttgagaaagcatgcaagattaccactactgggtagtccatgtccaacgatgggtgctagggaaaggtattggagaggcatggtccgtttagaggaggagccgtggattagagatcacgagattcagggctcaatcctataccccggggctggcttcttgattatggcaatcgaagctgcctcccagcaagctggagaacagagaaaagttagtgctttcagattaagggacgtccacctagatgctgcacttgtagtgacggaggatagtacagctgaagcgattctacagctacgtccccacttacttgcgcctggctcaagtcagtcaagttggatggagtttaccgtcaactcctccatagatggtggagaccttcgtcagaattgcagtggtttaattatgatcgaatacgcagctgatgctgacagcgctatggacagggagcgtgctttggaatcagatatggtttgtgattggtacaagaagacttacgtctcttgtcagcagtctgtggatgtcggtaaattctattctagacttgcatctttagggcttgtttacggcccgacctttgcaaacgtaaccgaaataaggaggaccggccaggggcagtgtatcggcgcagttaggattccagctgtggatagtttagtcccgcctgcttaccgttctcaccctcacgtgatacatccaggcaccctagatgcagttttccacctggccttcgccgcactagaggatagtttactgccgggtcccatggtcccaacgacgatagacgaactggtagttgcagcagacaccccgaacacccccgggacgcttctacgtggcgtatctagaagttccccccatgggtttagagaactgatatcagatattgacatgctggacgaccaatcaagtcgtgccttagtccaaataaaagggtttagatgtgccgatgtctcaggtgggaggatgacatccagcgaagctgccagtgctgaatccagaccgataggctttcgtttggaatggaagcccgcgatagacttattgacaggcgaacaactgcgtacacacttggatagaagagttaagcaggaaggagcatcaaacgtagcgagagccacagagttaaacaaccatgttcatcatttggaagaaacgcttcccagggtcgcggtagatcccgccatggctaacttgtccgattggctttccgcaaagagtgctaaactaaccaatggcgcagcgtcaagctccaaaaggcccagtccgggtggggatatgttggccatgagagacgcactgactgcggtcagggccggctctatacccagccccgagcagcaggacaggatgcttagggaggtggaacaaaatggggctcttagtatactttttaagagtcttgatgcttacatagacctgaggcaccatgctaagcctaatttgtcaattttggagttaagcttggactccgtgccctactctgtctttgcggccctgccgtcaaggcacaaaatcctgcagactgcgcaatatgcgataagtgtatcacaagagggggtcgcggacagggtaagagcgcaattcggtagccaagccagtgatattgacgtaagtgttaccgacttcactaaaaaactggatgagggattggggaaacacgatgtgatcctgatctttgatccggggtttgttcatgcgaaattggaggttgtacttaggaatgcgagaaaattactaaatcccggtggacgtatcgttgtggcagaggtcggcgagcctggtctttacctaggtacagctcttggttgtctacaatggaccaggaacctagatgtagcacaatcaagttcctcttggacgtcttgcctagctaggagcggattaacaccggccttgaagctaattgacatggacacagagtccgctgtacatggtcactttcgtctgtctttaacaggtaatgctgcggagtcaactaacagcgataataggcagccacagcaagttaccctgatagagtcagcaaacccttcagcgaccgcccaaggaatagccgcagctgtagcacaaaacctagacaaggcttctatcccgacaaagagagtccgttggggtagtgacgtatctcaactaaaaggacaaccatgtattgtgctgaccgatttggagtccgcgctacttaaggatcctgctcctgaagatttagctgcattacaatctctattttcccatgcggagtctacactttgggtttctggtccgctgggtcccgatgcagccctgatcacaggcttgtcaagatcagtttgcaacgaggccgcggacgtacacattaggactctagaagttgccggactgcctggaccaggtgccgatagctacgctgacttggtgacaagggtcttcagatacagtggtcctgatacggaatttaggtggcattctgacgcgcttttagttagccgtttggtggaagacgaggctaggaataaagagattgcgcagcttttgggtcagggtgaaaaagcagcggtagctacaacgctacaggagaaacccgaaggcctaaagctatgcatgaggcaaataggaatgcttgatagcgtctgcttcgagccggatcttctggcattagaaccactagaagccggggaggttgaagtggatgtcaaggcctccggtgtaaacttcagagacgtgatggtcgcactgggtcagatacctgatcgtgcgtttggatttgaaggagcgggcgtggtaaggagggtacatgccgcggaaaccaggcttaggcctggagatagggttgtattcctggcgcacggcgcacacaggacagtccatcgtgtcagagcggattatgcaatgccgatgccagataccatgagcttcgaagagggtgctgcgattcttttggtgcacactacggcttggtacgcacttgttaaatctgccagggcaactgcgggacaatcagtacttgttcacgccgccgcagggggtgttggacaggccgtgttgatgttggcaagacaccttgggctacaggtgttcgctacggtcggttcagaggagaaacgtaaacttgtccatgaaacctacggtgtaccccacgaccacatattcaattccagagatgccagttttgccatgggggtaaaaaggatgacgaagggcagaggagtggacatcgttgtaaatagccttgcgggggaagctctaagacaaacttggcattgccttgcgccgtttggaactttcgttgaattggggatgaaggatatactagataatgctaggttggacatgaaacccttccttcaagatgcaacgttcgtcttcttcaatttgaatagagttcagaaagagaggccggatttaatgggtgaggcgctgcgtgagaccatggcgttagtccgttccggggctctgaaaccggcaactccgttgacaagctacccagcgtctcaagtcgaggcagcattccgtaaaatacaaactggccaacacttaggcaaactagtactgactttccaagctggggatgttgtgcctgtggtgaggccagacctatccctgagcgatagtgggacctatttgcttgtaggcgggctgggggggctaggccgttctcttgctaggcttctggtgcagttgggcgcacgtaggctttgtttcctgtctagaagcggggcagcatcatcagaagccagagctctagtgaaagagttggagatgcagcatagagtccgtgttctagtatgcaagggtgacgtatctgacgcggatacggttagtagagtagttcaacaatgccgtgccgcgctggggcccattaggggtgtaatccagtgtgcgatggtgcttagggatggcctatttgagagaatggctcacgaccagtggactgagtctactagaccgaaggtgcagggcacctggaacctacacgagcagattcccgtctctgactttttcattaccttgagtagtttcgccggagtgtttggatctaggggtcaatctaattacgccgcagcgggagcttatgaagacgcaatggctcatcacagggaatctcttggccagcgtgctattactattgatcttggtatcatgagggacgtaggagtcttggcggagaacggcatcacagattacctgagagagtgggaggagccttttgggataagagagcccgaattccatgccttgataaagagcgcgataatgtccaccacacaaccgctgaccgagcgttccgttgtgcaaattcctactggattagcgacagcacgttccgcccaagccgctgggatcagtaccccattctatttcgatgatgctaggttctccatactagctcaaacccgtacatccgccggtgccagctctgcagccggtagcggggatgcggacgccggaaaggtttctgtcagaacacagttaagccaggcccactcagtcgcagaggccgcggcagcagtacaaactgtgctattggaaagagtcgcgagaacgttgcaatcaagcgtagcagaaattgacccgagtcgtcctcttcactcctacggagtagattccttggtagccgttgaaacggttaaatggatgttcaagacgcttgacgcaaaattgacagtatttgacgtgctatcaaatgtgagtataaccgcgttatgtgaaaagatagccagcatgagtacgctggttaagcttaat

SEQ ID NO: 2 - DNA, 5124 bp, Artificial Sequence
  PKSC1B
atgtcttctaagttgagggtggctaattttctattgttcggggatcaaactgttgagaaattaccagccataaggcaccttgttagccacggcgcgagctccccgctggttcagcgttttttgagacagttatgcgatgcggtacaattacaggtatcaaagctgccgctacattcagagcaacgttcaaatatcggcaattttgattcaattctaaggctagctgaaaataatgccaggcttgaagagcccaacgaaataatagcgacggtattgatgaatatagcaaggttaggcgaactgatcctatacgcagagcaagaccctaccgtattggcaagcaagggtaaccgtaactgcattcttggattttgcacgggggaagttgcggccgctgtggccgccgtggcacaagatactaacgagttggttgaactaggcgtagaagtcacacacataatcttcagaatggcaagagaacttaatcgtaggagcttaatggtggatcgtaccaacggcccttgggccaggactatcttaggaattagtgtggatcgtgtacgtgagattctacaagatttccacgagaaccagtcaattccaagggcaaggcaggtgtgtattgggtttgtgtcagacggctggctaacattgttcggtccgcctacaactttacaaaggcttctggaatggagcgcggagttagaggacgctccgcagatagatacggatgcaaggggcggagtgcatatggagaccttgccagaggttgatccagatagaatattaggctcaagcccttggctagatagggcaccagtccacacagcaactataatcagcccttacacctgtaaaccacgtcagcagaaaacactgaggggattattggaagaaataattgccgacgtcggccagaggacactaaacttagctacgtcaatgaacgccgccctagagctggcacaagcggacaaaataaggctggtcatgccagggtacacgtctcacgatgtttatttccagaaactgttacaaaaaaggggtatcgagtacagtgttatgtcccacggtgaccatttgtcttccggtccttctagacagggatccggattggtcgctgttgttggtatgtccggccgtttccctggtagtggggatatcaatgcattctgggaggggttacttgaaggtaagagatatatacaagagatacccaataccagattcgatttagagcagtggtatgacgctaccggcaagcaaaagaatagcacgatggcccgtacaggcgctttcttagacaaaccggggatgtttgacaacaggctattcgatatgagccctagagaagctatgcaaacagacgtgcaacacaggttacttatgacgacgtcttacgaagcattagaaatgtcaggctactacccggatggtaccctgtcaactaacaaagaccgtgtcgcgagctttttcggtcaaaccagcgatgactggcgtgaggtggtagttcaccaaggggtggatatatacttcgcgactgggagctgtagggcctttggaccaggaagactgcaccaccatttcaagtggggtggcccttcttatagtgttgatagcgcgtgttcatcatctatagccgctgtcggcctagcgtgttcagcactactaggaagagagtgcgacatggcattggcgggtggcggtagtttattattaagtccctcaccgttctctggattgtcccgtggaggattcctgtcagcgcacggcggatgtcaaacttttcatgacaatgcagatggttatgtaaggggagagggcgtaggtgtagtagttcttaagagactggaggacgcactggacgaccaagataacattctgggagtcgttagaggcagcgggcgtaattatagctctgatgcaagtagtatgatgcatccttccgcgaatgcccagaagaaactttactgcgatgtcttggagcaatctggtgtcgaagctaactctatcagctacgtggaaatgcatgggacaggaacccaggcaggcgattttatggagatgtcatcagtactatccacttttgcagagaagaggggctctgacaatccgttgattgttggcgcccttaaggctaatatcggacatggagaggcggcagcaggcgtatgcgctttaattaagacgttaatgatgctgcagagtagacagataccaccacagccagaccttcccggccccatcaaccatcgtttccccgatttagcagctaggaacgtgtacatagccgcaagaaatatgaggttggaagcaagcccggtagccaaagggacgttgcgtgtgtttctgaactccttcgacgcctccggagggaatagttgtttgttattagaagaggcaccaccacgtgccgtaaaggacgcggatcccaggggacaccatgtggtaaccttcagcgcaaggagtcagaagtcattgatttccataaaagaaaggtatctagcccaccttaggcaacacccggggactaagttggccgaccttgcatacagcaccagtgctagaaggattcatggacttctgaggtatgctatagcggcgtctagtatagacgaagtagtccaatgcctagaaaccgacttagcacaaggtaagaccccgagacagccacctgccacgcccaccgtcgtatttacttttacgggccaaggggcccactatgtcgggatgggtgctaatctgtgggagacatcagccacgtttcgtaacaccttgcatgattatcagactatggcatctgcacagggcttaccacatttcctacacttaattactgattcatctactccagcgcctcaatctggtccagatacagtgcaagtccagctagccatggtaagcctggaacttgctttagcgaagctatggaggtcctgggggattcaaccggccatggtgctgggtcatagtcttggggaatatgcagccttgtgcgtggcaggagttttgtccgtgagtgataccctttaccttgtagcgaaaagagcacaaatcatggcaggcgcgcttacaccgcatgaatacggaatgttagccgtaaatctaagcgttgcagacacaagggaagtcctttcttctgggcagcatacgtcctgtgcggtcgcctgtataaacgcccccaaaatgactgtggtcagcggtcttcgttcaaaacttgatgatttgcaagaccaattaaagtcagatggcacaagatgtacgccactttctgtcccttacggtttccattcttcccaattagacccaattcttggccagttcgaggaagcttgccagggagtaacattttcagcgcccaatgttccggttgtaagcactttgttagcaaccacagttagggaggagggtacgttcagccccgaatatcttgcaagacaggcgagagagcccgttgatttcgtcggtgcgttgggcgcggtccaggagcataagttcccgagcctaacgtttctagagattggtcccgacccagtatgctcaggtctggtaaacgcaacgttaggagcggacgaagctgcgttacgttgcgtggcttccatgcacaggggtaaggctaactgggccagtattagttgttctctaagagacttgtatactgcgggcgccgccatcgattggcccgcccatcatcgtgattttaaatccagcgtgagccttctggacctacccaagtattcctttgatgaaaaagaattctgggccagttttcccgatagggacctgcagacaataggtgacgtcgagactaaacactctcagcctcctgcgatcgttccgtccgttcaaggctattgcacaacaacccttcaaagaataacccgtgaaactattgaacctgacggtctatcagtaacttttagttccgatcttgctgaccaacacctgagggcggcggttcgtggtcacgctgtagcagatgtagaaatttgtagtagcagtttattactagacatggcattaagtgcggcacagtatgcctatatgaagcattctcctggtcagaaaatgcctgtacctcttaccgtgagaaactgctatttccacaggggagtggtgcttaccgataaagcacaaaccgtggaggttactgtgactctaacctcaagcgcgaaaactgccgacatccgttaccattgtcgtacccctgacgagtactatgaggtcggagcttgtcaagttgtactgaagcccgcaagtaagcccgaccaagcgggtttcttagttagatcacgtatggctgcgttgaaggctagtgcatctcacaggctggggaggcgtgcggtttacagattatttgacaacgtggtgaggtattccgagcagtatcaaggtttagaaaatgtccatttatccgaagacatgcaggatgcggttgcagaaatcaatatggcgcaagtcccagccgcgggtggtcactatctacatcatccattccttttagactccatcgtccacttatccggtttccttgttaataacggattacgttactcatctgagtgggcctgcttgtctaccgggtttgacgaatggcatctattgaaaccattagatcctacgacggtttacacttcttacactttcatggaagatagtaggagtacgtcaaatcttgtcactggagacgtatatgtctacgacggggaagaacttgtgtctgtcctgactgggttacaatttcaaaaaatgaaaagaacagcccttactcatttgctaagtccacctactataggaaacatggctgcaaagccaagtacacgtatgcccaccatggcccagacagagttacttcctgtcccgacaccacccgctactgcttctgtggacgacggggaaggcgagaagtttgatttagtcaacaccctattttccataattgcgagggaagttggagttgagccgagcgatctagagggggacgtcaacttagcgaacttgggtatcgatagtctgatggcgatcactatcatctcagtcatgcaacaggagaccggcgtagaacttccgggcaccttctttcttgataacgctacaacaacagctgtcattgccgcagttggt

SEQ ID NO: 3 - DNA, 1131 bp, Artificial Sequence
  PKSC1C
atgtcctctgcggttactgtctggcaggacgccctaaatattatcgcgcaagagagtggacttgaaccagcagagatcatcgaaactgatgatacagctttcctgacgctgggtatcaatcaaatactagcaacagctattttggcgcatctaagaggtccgagaggagagcctttgcctagagatatcttcgatcaaaaaccgactgtgggtgcgttcagaagattttacgagactcccatccacttagacatcgctccagttgctgccccagcaccacctaaattgaagcgtgttccgagctcatctgtgccactatctatcgtgttacagaataatcctgcgtccagccgtcacacagtttttcttttaccggacgggagtgggagcgcaatggcctatgcgaatctacctcccgtccacccagcagtgtgcatcgttggcatgaactctccgtatcttcgtgacgccggcagctatcgttgctctgtggaggaccttgctagtcaatgggtaagagaagtctatcgtaggcaaccaaggggaccatatatcgtcggagggtggtctgcggggggatattactcctatgaagttgctaaacgtctgttacaggatgggcacgcagtagcgaagttaatcctgatagacagcccatgcaggacggtgtttgaatctttgtctatggaggtggtaaactatttaagttcacgtaatttaatgggcaactggggaagccctgagatgcctgagtggttggtccagcattttaggagtaccttagcggctgtcgggaaatatcgtcctagaccgatcgacagcgctggggaaatgcaaacctacataatctggtctcgtgatggagtgctggaccaggatgcgctggcgaggtcagggttggacacatcagttaaagttagtagatttcttttgcagggaaaagacgacttgggacctaatgggtgggatgacctactgcccagtaaggatatggcgattgctacgcaatctggcactcactttactatgattaacaagccccacgtggctcagatgtctgacttacttagggacgccgtcatagggatagggtccgataggcaagcacactggcagagagtctctcagagc

SEQ ID NO: 4 - DNA, 7527 bp, Artificial Sequence
  PKSC2A
atgagctctgctacgacgaacgaggtaaggtgggcacaagacatcgctattgtaggaatgagttgtcgtttcgctgatgatgccgacagttttcccagattttgggacttcatctgcaacggaagatatgcattccattacccgggtaaaaaaaccaatacgagcctaccaaggggtgcacatttctttaaggatgacattgcggagtttgatgctaacttttttaacatctcaaaggtggaggccgaatctatagacccccaacaaaggatggtcatggaaacaacctttgaggctcttgaaaacgcgggtattacaatcgacaaggtcgccgggaccagagcgggggtatggatggcaaatttcacatccgactacagagaaatgctttacagagattcagagacggcccctatgtatacgttgagtggtgccagtaacaccagtacaagcaatagagtgtcctggttttttgatctaaaaggcccctctttcacacttaatactgcttgttcatcttccatggttgctacacacttggcatgccagtcccttgcattgggagagtcctcatcagctatagtgggaggcacctcattactgttgaaccccgatctatttctttttctatcaaatcagcattttctagcggctgatggaaaatcaaaggccttcgatgcaagtggagacggatatggtaggggtgaaggtgttgcagttgtcgtactgaaaagagttgccgacgcaatagccgacggagatccaatcagggcggtgattagaggaactgcaattaaccaagacgggagaaccaagggcatgacgcttcctagtgtcgacgcacaagaacaactaatcaaagatgcctatcgtaatgcaggactgtctatgaaagacacaagatacgtggaagcgcacgggactggtacacaagccggcgataagtgcgagactgaagcactgtctaggacattttccccttatagaacggcaagcgagagacttatcctaggttcagtaaagacgaacattggtcatctagaagcctgtgctggattagcctccatgattaaatgcgtcggaatattggaagcgggagttatacccccaaatccgctgtataaaaaaggtaatcctggtatcaaattcgacgactggaagttgcacgtacctacttctagcattcaatggcccacaagtgggctgaggaggatctcaacacagggttttggctatggtgggacaaatgcccatataatcatggatgatgcgcacaattacctggtttctagagacatcaccgctatccacaatacttgccttctaaacttgacgaatgggacaacctatatcgagcataaggaggcgccgcgtccgaggatattccacttttctgctcaagacaaggatggattaggtcgtgttagagatgcgacgtgtcaatatctaaaatcaggcgccttagaggcagggaagatgaggcagaatgaggacaagtacttgagggacttggcctataccttgtccgagcgtagaagtaggctacaatggcagacgtttgccgtggcgtcatccgtagagggcttgatcgaaaccttgcaaactaagccttgggcaagcccagaaacgagatccgcgtctaaggttcctagaattggcttcatttttaccggccagggtgcacaatggcccagaatggggatagagcttatggagtatgatatttttagaaagagtgtagaaagatccgacgtgtatttgagggaggggttggactgctcctggtctgcaattgaagaactggccaaacctgattcaagctccaatttaggtgctgcggagtactcacaagcactgtgcagcgtccttcagatcgctctgatcgacttgctagattcctggaacatcagaccatctgcagtcgccggtcacagctctggggagatcgctgccgcttattgtctaggagtgcttagttgggaagatgccttaaaggtggcatactttcgtggttcattgtcagcagaaatgaaaggcaacgatagcagcctaaatggagcgatgatggctgttggaagtagcccagctgacatcgagaagtggttagacaaagttacagcgggggaggtcgtcgtagcttgcgtgaactcaccagcgtcaattactctgtcaggcgacgccgctggaattaatgaattagagtctatgttaaaggaggcgggaatctttgcacgtaaattaaaggtggatacggcgtatcacagccctcatatgcagacaatcgccggccagtactttgaagcaatcgctgatatatccattctgcctgtgaggaatggatgtcagatgcactcctccgttcgtgggggctatatcgatcctaatgagttaggggcagcgaactgggtgcgtaatttggtttctaccgtacagttcgctgatgcggtgcatgacttgctacgtccccttgtttacggagaaagggcggctcacaacgctgtagatatattggtcgaggtcggaccacactcagctctacaggggcctgttaatcagacgatgaaggctcatggcattaacagtatcaattactgcacgatgctaagcaggggcaaaaatgccattaacaccgcattgtcatgtgccgcgacgctttatgttgaaggcttggctgtagatctgaggagggcgaatcaggatgagtcattcgcggtagaacccattttcgatatgccgtcctacccttggaaccatagcattcgttactgggcggaatctcgtgttgaaaaggagtatcgtcagaggaaatacccaagaacaccgctgctaggagccccttgtccttccatgaacgccggagaaaaggtttggagaggctttataaggccgtctgaagaaccgtgggttagagatcacgttatacaagggtctatattgtacccagcagccggctttttagctatggcaatagaggcagcccgtcagggaacggaaactggcaggtcaattgatgggttcaggctgcgtgacgttcaaatcaacgctgctcttgtcattgaggaaaatgtcgagcccgaagttattcttcgtcttcagccacacaggatgggtacccttgatgccggtagtgtctcatggcaagagttcaccgtgagttcttcaacagatgggacagacctgcgtcaaaattgctctggacttttagctatagattatgagccagcagagggcagctcaatgcacattgaaaagattaaagaggttgaaacaatcaaggggaagttagtcaaagccaaagaacagtgtcgtgcagccatcaatgttgacgagttttacgctcacctagacactgttgggctgacgtacggtgagacatttgctaaccttactgaggtgcacacaaatgcagctactggagaatgtacaggtaggttgttggtaccagatgtagaaagcgcgataccaccacatatgcgtgaaaggccacatatcatccatcctacgaccctggatgctatctttcacttagccttcgcagcaatctctgagcacccgttctctttgaaaagcgcaatggttccaatcagcatcacagaggtggtaatatccaatgaagttccgcataggaagggctcacagctagaaggatttgcccaaagctcaagattcggcttcagggagcttgtaactaatataaatatattcgatgagcaacttaccgatgccgtagttaaaatttctggcttcaggtgtgcagatgtatccggcagcagtcagagcacttcaagtggagaagctgcaaaaccgattacgtttaaggaaatccacaggcccgcactagaattacttgattacgaagatctacaaagagcagtaaacgccaatgccgacgaaatcgctagtgggatcttcgaacaagacacgagtcttgataaatccgctcttgcgatagtcaagaggactctgtctaacgtaccaaggtctagcgttcacaaagacttgctgggattctacgactggatgcaacgtcaagtttcttcagcagataaggcttccggagcaggtcagcgtgattctactggctatacgaatatcagcgtcaaagatttagaaggcatattaagcggcgaaaagatagcagcgcaagctatggatgaaaacgtcatcttgatgcctgcccttacctcttcagcaaattttcagcagattatgaaaaagctgtctcagtatcttttaatacttcaacacacatatcctgagttgtctgtcttagagattatccactccgccgaaaactcaaccaccgggtctattttacctcaactacagtccgcagaagtgattttagatacgagcaagtacactgtgcttgtacagaatgagaaagccgcgaaaacggttgagtctcaactaggtactttgactgacttgatcagcctggaagtgtccgcaacggataactcagtccaggatcatggaagacagtatgacttggcactagttgtgaacatcgcccacaaggacccggatgtacttctttgcgaggctaagtctagccttaaagagggaggtagagtttgcatcatagagataggtgaacctctgttaaaccttgggattggcctggccgctttacaacacacacattttataatctctagtcagaatacagacgagtcccatctgaatcgtgcgggatttactaaagagttgttgttaggggatgctttacctccgaagaatgaattcagactaatcgctggcaacaccagtaaaagattagcggtgacaatacaaggggaaatagtcatagtccaagcaccagagccttctaagtctgcgcaaaatgttgcagatgcgttaaccgaagtactggaaaaacagtgtgttagggccattcgtgtagactggtctcttcctgaatacatttccgtcatcgaaggtaaggagtgcattgtcttggccgacttagagaagtcacatctattggaagcgtcccaggaagaattccctatcatacaacagaccatactgaaagctggtgggattttatgggtctcaggttcaattggtccggacgccgcactggtaaccggcttggctcgtactattaggaacgagattcccgggagcaagcttagggttttgcaaacgaacgaattgtccctggctagtcctacaacttggagtaactacattttgcgtttgctgcagagccccacgttggactcagaattcactattaaagatggattccttcaaatcagtagagtggtcgaatattatacacgtaatgatgcacttgccgtttctctagggagacaagagccgaaaacggttcatatgccgctatcagaaactagttctcctgttaagctatgcattaaaaaccccggaatgttggatagtttatatttcgagcctgacgacatcctaaattccccattagccagcggccaggtggagatagaagtgaaagcttctggtgttaattttagagacgtgatggtatgtatgggacaaatcccggattcccttctgggtttcgaggccgcggggatagttaggcgtgtcggagagaacgtgcaaaacataaaagcaggtgacagggtgtgttttattgcccatggttcacacagaactgttcatagagtcaggaatgagtacgtcgtgcatatccccgacgaaatgagcttcgctgaagcctccggagttctacttgtacacggtacagcatggtatggcctagtaaaaatagctcaaatcaaggctggccagacaatactaattcacgctgccgcaggtggcgtagggcaggcggcggtaatgctagctcaacatttcggtttggagatctttgccactgtcggttccgacgacaaaagacaactaattcaagacttatataaaatcccggaagaccatatattcaatagcagagatctttcctttgccaaaggggttttaaggatgactaacggacgtggcgtagatgtaatcctaaattccctgtcaggggaaaccttgcgtcagacttggcactgtgtcgcccccttcgggacattcatcgagatcggcatcaaagacatactgtccaatactcgtctggatatgagacccttcttacaagacgctagattcgcattctttaatctgaatcgtatagagaatgagagacccgatttaatgtccgaggctcttaatgagtccatggcttttatatcttctggcgctaccaggccggtctctcctcttatgaatttccctgtgtcccaagttgaggatgcctttaggctgatgcagactggcaagcatcgtggcaaactttccctaacttatagctccagtgatgtcgtgccgatccagtctagaccgacgagaagtattaggctagacgaaaccagtgcctacgtattagtgggaggtttggggggactaggaaggtctcttgcacagcttttcgttcgtttgggctgcaaaaagctgtgttttctgtcccgttcaggtggggcgagtgaaaaagcacagaagttacttaaagaccttcaacaacaaggcgtcaaaaccctggccttacgttgtgatgtatctgacgcgcagagtgttaaagcagcgatcaacgagtgcgcaactcgtctgggacccgttttaggcgttgtccaatgtgccatggtcctacgtgacggtcttttcgaaaaaatgacccatcagcaatgggtcgaggggacgagaccgaaggtccagggcagctggaatctacatgtaaatttaccgaatgtcgacttttttatcatattgtcctctttcgctggcatttttgggagtaggggacaatccaactatacagcagctggagcatatgaggatgctttggccaattataggcgttcactggggctgaaagcagtgacagtcgatttaggcatcatgcgtgacgtcggagttcttgccgaacaaggtataaccgattatctgcgtgaatgggaggagccatgcggcatcagggaggcagagttccatgctctgatggagaatgtcttaaccagcgaggttttgggagaccaagagccattacccgcccacattccaacgggttttgcaaccgctaaaactgtgcagcaatttggcataacaactcccttctattttgacgacccaagattttccatcctttctgcagctggaagcagtaaaaccggggcgggcgactccacagattccaataaagccatcagcgttcagaatcagattgcacaatctatttcaatttcagaggctgcctcagccgttactaacgcgttagtagcgcgtgtcgcaaagtcccttcagagcgcgctgagcgatattgacccctcccgtcctcttcacgcatttggggtcgattcacttgttgccgtcgaggtggtcaattgggtattcaaagagataaaggcaaaagtgacagtctttgacgtactaagttccataccgataaccagtttggctgaaaaaatagcactaaagtcttctttgttgccgcaactaacg

SEQ ID NO: 5 - DNA, 5223 bp, Artificial Sequence
  PKSC2B
atgagtagtaaattaagagtagcgaacctattgttatacggcgatcagacagttgaaaagcttccagcagttagggcattggttgaacatgcacaacgttcccccgcaggcaggcgtttcttgagggatgcgtgcgacatcatccagatcgaaatttttagtctggacactgatgagagagctcatgtcgggcatttcgatacactgttgcaactggcagagtccaatgcccaagccgaccaaccttccgagattgtcgccactatactgatgaatgtgacgaggcttggtgagttcatattatatgcggaggagcatcccaacgttctgggtagtatagagcagccgactcacatcgtggcattttgcactggggagatccccgctgcggttgctgccgctgccagagatagtatcgagctatacaaccttagcatagagacggttcgtatcatatgccgttttgcgaggaacatcatcagacgtagtgtccttgttgataggactaacggatcatgggcgacaaccatagttggtgtctcaccaggcagagttcagactatcctggacacattccaccaatcccagaatatagcgccgacacgtcagatcaacattggcattatggccgccggatggctaacattgtttggccctccaatcacaaccgagcaacttttcaactggagtaaggagttggatggggcatcacgtatcaagactgatgctggaggtggtgttcatctgcctaatctaccagagctggatttagatgaggtggtagggcttagcccacttttagatgtaccaatcaccccgaaggcgcgtttatggtccccatactcctgcgagataagaaacgctgccacgttgagagatcttattagacaagttattcctgacatcacccagtattcccttaggctgagcgacacgatcgagacagcggttaagggattgagtaatggcagtgtgaaggtcgtttgtgtaggctatacagcgcatcttattagcttacaaaaatccttacagagagaaagaagggaagctactgtcctgcaacactcctcagcggggagtacttttttcacttctccgagggggggtagtgagtcaatagctatcgtcgggatgagtggcaggttcccgggaagtgataatattcaagagtattggcaaagtttgctggacggtgagagacacataaaagagattccgaagaacaggtttgacttatcaaaatggtatgacgagacagggaagcaaaaaaatgcaaccatgaacagaagtggggcctttttagaccgtcctggttatttcgacaatcgtttgtttaatatgagcccccgtgaagcgcttcagaccgacccattgcataggatgtttctaaccgtaagctacgaggctttggagatggccggctattctccagaagcgactcttgcaacaaattccaaccgtatagccacatactttgggcagacatccgacgattggagggatattgtattaactcagggagttgacatatattacgcaccaggcatttgcagagctttcgctcctggacgtttaaattaccactttaagtggggggggcccagctacagtgtggatgccgcctgcgcttctagcattgctaccatctctctggcgtgtagcgcattgcttgccagagagtgtgataccgcgttagcaggcggcggatctatacttgactccccggctccatttgcggggttatctagaggagggtttctttctcctgagaagggttgcgagacctttcatgatgacgcagacggatatgtgaggggtgagggcgtgggtgtggtagtgttgaaaagattagaagacgcggtggccgataacgataatatcttaggtgtaattcgtggctccgcacgtaactatagtaagggcgcttcttcaatcacacatccctcttcagaagcgcaacagcgtctgtaccgtcaggttttgaaccagaatgcgattgacgcagcctcagtcagctacgttgaaatgcacggtaccgggactcaagctggcgactctacagagatgagttctgttctttccacgttcggacagtcacgttccaaggataacccgttggtcgtcggtgcggttaaggctaacatcgggcatggtgaggcggccgctggcgtttgtgcattaattaaaaccttaatgatgttccaaaaacatacaatacctccgcaacccgggatgccttttaagctaaatcatcatttccccgatctagaaaaaatgaacgtgcatattcccgccactgcgattcctctaacctctgcatcaaacgccgcaaagaggcgtatttttctaaattctttcgatgcatcaggtggaaatagttgtcttcttctggaggaagcacctcttaagcattccaaagcttccgacccgagaaatcaccacgtcgtcacctttagtgcccgtaccccgttttctctaagggcaataaaagagaaatacttgcagtacatcaggcttaacccgaacacctccctggctgacttagcctatactaccacagcaaggcgtatgcatcagagcagcgcccgttccactttcacagccactagtatagaagatttcgcgaataagttagaaacggacttgaagaaagaagatagccctgtcaagaagtccaagggcgcgtcttccggtcctaatgtagtttttgcgttcactggtcagggctcacagtatgcggggatggcgcatcagctatggcacgattctgcagtgtttaggcgtctgatagacagtatccaatcaatcgcgaccgccctggacttaccgaaattcgtcgaccttatagcttctcagagttttgatcttagcaaggcgtcccccatacagacgcagttggccatagtagctctggaaatcggattagcacaattgtgggcctcatggggtgtgcagccgtctcttgttataggtcacagtttgggagaatacgcggcactttgcatttctggagttcttacggttagcgacacactttatttagttggtaaacgtgcaatgatgcttgtagaatctgtggcccagaatgaatacgcaatgcttgcgattaatgacgaggtggacatcatcagacaaagactagcaacggatgcgtataatacctgcgagatagcttgtattaacgctccaaagtctactgttgtatcaggtgccctgagcgagattaaaatcatgcagaaggaattagaagaacaaggctaccgttctactctattacatgtaccgttcgggtttcatagcaaacagatggaccccattttggacagttatgaatcatgtgtccagggcgttggtatatcctcacctagggtccctattgcctcaacgttactaggggatattatccaggataaatccacagtatcttcagtatacttaagacgtcagactcgtgagagtgtaaacttcgtcggggcattacaagccgctcaagtgtcaaattttcttagagatgacaccttgttcttggagatgggaccagatccggtatgcatgagtttggtcaggtctactttagggactatcgcgactccgcgtcttttgccagctctacgtcgtaatgagaacaactggctaaccacttcaaacactctagcggctgtccaccaggccggtgttccggtcaattggccagattatcacagagagttcactaactgcctaacacttctggatcttcccacctacgttttcgatgaaaaggaattttggacctcctacccggaccctgagcaactttcaggtgttgaacagaaacacctgagtccgccgccggtccctgcagtccaaggttttcccacgacaactcttcaaagactaactcaggaggctttcgaagacggaaagatctccgttaccttcgaatcttccaccagtgatccacatctatttgaagcaatcatggggcacgcagttgcgggcgtaactatctgcagctccagcatcttctccgacatggcgctgagtgcagccagatacacgtgtgaaaggttgcagcccggccgttggagtgaagaactactgactatttctggcctagatatacaaaggccaatagtcgtacttgataggaaagatagtcacataatacagatcaatgcaaagttggacgcgaaaaccgaagaggtatacataagtttccaagaccaggtaggaaagcctatcgggagttgcaaaatcagtttccacgacgcagcaagttggaagcaaaacataagtagaatcctgtatctagttagtttcaggattgatgtgctaaaagaggcaaccataaccggccaagggcacagatttttacgtccagtcatatatagattgttctcaaatgttgtgaattacggcgaaagattccaagggctggaagaggtgttcctggatagcgaatgtaatgacgttgttggtcaagtccgtctgcctgaccttccgtcatctaagtctggtcactttctttattctccttatctgttggatgccgtcgttcatgttgctggtttcctggttaattgtgggttaaagtacccggaagatatcggctttcttgcgtcttcattcgaatcctggcacatattaaagccaatattgccgaacaagacttacacttcttacagtcatatggaggaatcctctaacggaagtagtcttttgggtgacgtatatgtttttgatggtaaggatctggttggctctcttaccggcttgagattccaaaaaatgaaaaagattgcacttacgcgtattctacagagcgccgccccacattccagcatgaagatcggtgccggagtatttaggccggaccttcttggtagtagtgagaagcagagcagtaggaataagcaattagcacgtgatgtggatttcgatactcttccgtcctcagtagaacccagcgcattcactacaccgaagccaagctctagtgtaacctcaataattgggcacgatgagccgggtgtaggcgataaattcctagcggctgtcgctgcagaagtaggttgtgagatctccgacctagaaccggacactgtgttcggtgaccttggagtcgatagtctgatggcaatcactgtcattgcaagcataaggaatgacaccggagtggagttacccgggtccttcttccttgataatccgactgttgcagaagccacaaaggcgctaaga

SEQ ID NO: 6 - DNA, 1146 bp, Artificial Sequence
  PKSC2C
atgtctagcagtgctagcgtggaaacggcatggtctcaatgtttacgtattatagctaaagagacggggttttcaatcgatgacattgacgacgaagacgaattcactaccgatttgggcgttaacccaatagtagccaggtcaataattcgttctttcgaaagtgttttgaaaagggatatcccatcaactgtattcacacaatgtccaactatcaaagaatttcgtgggggatacttccaaagttgcatcgactccataaccgaacccaaagacgaccttgcggtgaaaaaagcggcgacagcccacggcggtaacaagaaatctacgacaaacacaacgagaactagagcaagagttcctataagtatcgtgttacaaggcaagccaacaatggactgcgctgaaaagacaaacatcttcttgcttcctgatggctcagggagtgggatggcttacgtggagatgccgttgatcgacccgtctaccgtgtgccttgttgcccttaactcaccgtacttaaatagagcgtcagagtattgttgttctatcgaagaaattgcgagagaatatgtacaggagattcgtaaacgtcagcctcacggcccatacgtactgggcggatggtccgctggcggatattactcctatgaggtagcatgcgaactaataagacagggtgagagagtaaagaaactaattcttctagattctccatgtaggcccgatttcgaagagttaccaatggaggtagtacaatatctgtcaaagaagaacttgatggggaattgggaccgttcagctcgtcatacatctgtaccaagttgggttatcgaacattttagatccacattgagagcggttagggaatacgtccctgttccgatggatgctgcggatgcacctgatgaagtctgtatcatttggagtagagaaggtgtcatgcccgcaaaccagctaagaagaaccggactagaccttagggttagagtagcgagatttctgctggagggaaaacccgatctgacaagtgcttacggatgggatagattattcccaggagctcatatatctatatcaagtattagcggcaatcatttcacgttaatcaataaacccaatgtctctgtgtgctctttccccgag

SEQ ID NO: 7 - DNA, 7176 bp, Artificial Sequence
  PKSC3A
atgagctcaggtgacgccaccacgcaggacaatcatagcgtagctataacaggtctatcttgtagatttccaggggacggagacgacttgggcaatttttgggatagcatctgcgaaggtaaaagtgcctggagcaaaattccaaaggaacgttttaatgttgacgcgttttggtcaccatctaaaaatcgtaatacgagcatcacaaaaggcgcgcactttctgaaggaagaggtcagtaaatttgacgcaaattttttctctctacccaagaaggaagttgaagctatggacccgcaacaaaggatcatggtagaggtcgtttatgaagcactagagaaggccgggttgccgctagagaagatcgcagggacacgtacaggggtcttcatgggacactttacatctgattacaaggaaatggtatacagggatcctgagaacgcaccatcttactccattactggcgcttgtaaaacgtccctagcgaaccgtattagttggttattcgacctaaaaggtccttctttcgcgcttgacacggcctgctcttcctccctggtcgctcttcacttagcctgccagagtctgaggtccggggagtcagacatagccatcgtcggagggactagcttattattgaacccggagatgtttatgtatttatccaaccaggcattcttatcacccgatggaaaatgcaaaagtttcgacgagagcgcgaatggctacggcaggggggaagggttcgggtgtgtcgttcttaaacgtattgacgatgcggtttcaactggggacccaataagagctgttatcagaggtacagggagtaaccaggatggacatacaaaagggtttacgttgccaagtgcggacgctcaggcggcgttgataaaggaaacatatcaacgtgccggtctggatctaaagagtactggttacgtagaagcccacggaaccggcacgcaagcaggagatgtgcaggaaaccgaggctcttgcgcgtactttggccgccagtcatagcgccgaaaacaagcttatagtgggctcagtcaaatcaaacatagggcatttagaagctgcagcgggtatcgccggcatagtgaaggcagtgttgatcctagagaatggtgtcatcccccctagcataaatttccaaaaaggtaatccaaagataaaatttgacgagtggaagattaagattcccactgctctaactccttggcccactgacggcttacgtcgtatatcaaacgcatcctttggttatggaggaacaaacgctcacgcgatcctagatgacgcatacagttatcttaaacgtaggtccatttccggtaatcattacactaaggtgtcacacgccactcatcccgtgaatgatgttccaaagataaatggctttcatgaacaccagggtccgcgtctattcgtcctgtctgcagccgacaaagaagggttacaaagagtcaaaagccccctttctgactacgtaaaggaaaaggcggttaaattagagcagaattctggtgatgcgacgatcttcatgagggagctagcatacacattgagcgaacgtaggtcacacttgcaatggaagacctacggcatagcctcaagtcctgacgaattgtctgaagttcttaaagataaagagtcattagcatttgtatctcaatcatcaaggtccccgagaataggatttgtttttactgggcaaggggctcagtggccacgtatgggggccgaactaatggaataccaaacattccgtgcatccgtgtcagcggcagatacgtacttgagagaggagtgtgaatgcccttggtcagcggccgaagaactacagaaaggtaagtctacctctcagcttcatcttgccgcatattcacagacgttgtgtaccgtattgcaagtcgcgctagttgatttgcttaaaacttgggatgtaagtcctaaggcggttgttggccacagttcaggcgaaatcgcggcggcgtattgtatgggggccttgaccaaggaggatgcgtggaagatcgcctactatcgtggcattttatcatctgagatgaaagatgttgcacctgaactagatgggagcatgatggccgtgggccttagtccagagaaagcggaggagtggatttctaaaattagtcacggtgaagttgtagtcgcctgcgtcaattcaccttcctctgttaccttatccggggatacccccggaatagatgaactactagcattattaaaagaagaaggtatcttcgcacgtaagttgcaggtcgacacagcgtaccacagcccgcacatgcaaatggttgctcaggactactatgaggcgttagctgacattgagccgctgcaagcgagcggcgaatgtaccatgcactcttccgtaacgggcgcactaatcgaagcatcacaactgggtgccgtcaactgggtaaaaaacttaacgtcccccgtacaattctctagtgcgatatacgatatgttgcgtccaatgaagaagtcaaagagggccgacaataacgcagttgacctgttgttggagatcggcccacattcagcacttcagggccccgccacccagaccctaaaggcacacggcataataaatataccgtaccaatctgtcattacccgtaatcagagtggcgtccagactgcgatgagcctagtcggggctttattcactcagggagtaccagtaaacatttcccaagtcaataatgatggtagtacgcacattacgacgccaaaaccattggtggacctaccaaaatacccgtggaaacacagtcagagatactggcacgaatctaggattgaagcggaatacctgtccagggagactccgaaactttctttattgggcgctccatcaccctccgtcggcgatagggagaggctatggagaggcttcgtacgtttgagcgaagagccatggattgctgaccacaagattcttggggaggtcctttatccgggggcgggctatttagctatggcgctggaatctgcttatcagacagctgataaaaataagaagatagccgcgtacaaactaaaagaggtacaatttacttctgcggctataatatctgagggtaacgatcttgaatgtatcgttcaacttcgtccacatataattggaacacgtgatagcagtagtacgtggacagagtttgttgttactagctccgcggacggcaagactctgaggaagaactgtagcggtctgctgattatagagtacgagcccgctgaaggttccgacatgaaacgtgaacgtgatttggagttacaagtgagcaagaatcaatacctggaagctaagcgttcatgtaccaatgctttaacacctacagagttttataccgacctagcctctatgggacttatatacgggccaagttttgcaaatctgactgcgatcaacaatcgtgacggtcagtccgtatgctccgtgcaaatacccgatgttcaggctcgtaccctggaaggatccgacaggccccatatcatccatccaggtaccctagatgcgatatttcatttagcctttgcggcgataaagggtggtaaagccaacgtatcttctgccatggtccctcgttttatagacgaggttatcattagcgctaaggtccctttcaaacctggtacgaatcttccaggcttcagcaactcagcaaagcacggattcaaggaattgaaagctgacatcgttatctttgatgagaacgaaaacttaccaattgtggagatcgcaggctttttgtgcatggaaataagtggtggatcactagggaacgctgcagaaaccaaaccgaaagccatcagttccaagctgagctggaggccggcaattgatcttctgtcagtagaagagcagagaattgcgcttgagaaatctactaacttgaataagctggcggaatatttacgtttgttacaccattccaatgcggcactttctattctggaagtcgatttagaatccgaacattcttctcccaccgtcctatgccccactttagacggattcaagggtatcttgcgtaccggagagtatatcattgcgtgtcaggacgacgcccgtaagtccaaattccaggaggacccatctctggatccaaatataacggtggaggtcctagatattgagaaggaactgtcctccgagattctgaaggaccagtcctatgacgtaatcgtcgtttctaacctagatgccattgcaggcaagattgcggtaattgaaaacatgatcaagttgttaaaggaagggggtaaaatttgcgtggtccaagctaataacgaatttgaagaggttaagcgtttgctgcgtaataaagggatcaaaactatggttttccccggtttagaagattcaagattacagcagcatgggctgatcatcgggtcccaaggtggcattacacaaacttctggcggtggaatagaagtaactatcatagaagcggctaagccatcaaaagccgctcagatagttgcaactgaacttgcctacgttctagaaaaactggattataagacgcacaggtttacgtgggggtcagatgtgacgaggttgaagaataagtcttgtatatctttagttgaactggacacgagtctattgagagatctgacggagcctgatttcgtgagcattaaaaatcttatacttgataccgcaaatacgttttgggccgttggattcgatgaccccagcgcctttatgataaacggtcttgcaagggttgtgagaaacgaaacgcctggaatgttgtttagaacattacatgcgaccaaaaactcagaacacttgggacaacttatcgggtgggccttccactcaaagactgctgacgacgaatttctggtacaggacggtcttttacaagtgagtagaatcgaggaagatgctgccctgaaccaggagataaatgatctactgccgggaactcaactgaagattctatcaatacctctaaatcaagcacagtaccccctaaagctttgtgtgcaaacaccaggaatgttagacagtttatgttttgaggcggatgaccttcctgagactgagctagaggatgagaaaattgaaatagaagtgaaggctacggcactgaacttcagggaggtcatggtggctatgggtcagatatccggagctaaattaggattagatgcatctggaattgttagacgtgtcggagcctctgtgacaaaattcaaggtgggcgaccgtgtagcaatgtatggacacgggtcacatcgtacagtacatagatcccgtgcagattactgtgcgcttatccccgacgggttgtcattcgaacaagccgccacaatcccaactgtgcacggaacagcctggaacgcactagtaagactagcgagagtacagaagggtcagtccattctagtacacgcagccgcgggaggcgttgggcaagccgcgatacaaatagcgaaacactttgaaatggaaatcttcgcgactgtaagtagcggagcgaaacgtaaattaatccgtgacgagtatggcattctagacgatcacatctttaacagtcgtgatctaagctacgtcaagggcatcaagcgtatgacaaagggaagaggtgtggatgtagttttaaacagcctgtcaggcgaggccctgaggcaaacttggcattgcatcgcgcccttcgggtattttttggaaatcgggatcaaggacatccttaataacaccggcctagacatgaagccgttcctgcaagatgcgacgttttcattctttaatctaactcacatcgaaaactccagacctgacattatggcggccatcattgagggcgcttttgacttccaaagaagaggtatcacacgtccgataagtccgcttgtcacttatcccataagcgaaatggaaagcgcctttagacttatgcagaccggcaagcacttaggaaaaatagccttgacgtggtcagaggaacacgtgattcctgtcatccagagagaatctaatagtccaaaaattaacccggatggtgcttacattctggcagggggtcttgggggactgggtaggagtctttctatgaagctagtagggctgggagctcgtaaactgtgctttctttcacgtagtggttccgattccgttcaggcaaaaggactggtgagggacctagagggacaacaggttcaagtaagggtctataagtgtgatattgcagatgaaaaagcggtagcaacagtcgtaaaaagatgtcaatccgacctaggggatatccgtggagtgtttcaatgtgcgatggttctgagggacaccttattcatgaacatgacatatgaacagtggatcgaaagcacaaggccgaaagtgcaaggttcatggaaccttcatcagaaccttcccaatgtcgatttttttatcacactttcaagttttagcgccatatttgggaacagaggtcagagcaactacgcagcggcaggtgcttatgaagatgcgctagcccattaccgtagagcccatgggcaacatgcaaccactcttgaccttggcataatgagggatatcggagtccttgcagaaaccggaataacggagtccttaagagagtgggaaaagccgtacggcataagggagatcgagttcctagcactaatggagagggcaatcgctggagatataacagggaccatctccccccaagtgctaacgggtttagcgaccgccggctctgcgttcgcggccggcattacgccgccgttttacttggataacgcaagattctccatcatggcgagaactgacatccgtggccaaactagcgcgacggccggggattccgtttctgcgcagatgctgataagtcaagcgaaaagcttcgaagaagctgccgactatgtacttacagcgcttgtaaagcacgttgctaagatgttacaggcctctgcgagtgaaattgatacctcaagattcctacactcctacgggatcgatagccttgtagcgatcgaaattgttaattgggcactaaaagaaattaaatctaatattaccgtcttcgatgttttagctggggttcccatgacgactacagccaacaagatcgcggaaaagtccggagctctgccaaaggagcttgtaagggtc

SEQ ID NO: 8 - protein, 7077 aa, Artificial Sequence
  PKSC3B
ATGTCTTCCTTCCATGTGAACAGGTTGCTAGTTATATACACTAGTTCAGACGAAGAATGCGTACTGTTCGGCGATCAAACCGTTGAGAAATTGTCCTCCATCCAGGCCCTGGTGAGACACTCCAAGACCTCCGCGGGTGCCCGTAGGTTTCTTAGAGAGGCGACCGATCTGTTACAAATAAATTTCAGCACGTTAAGTAAGGAGGAAAGAGGATGGTCTCATGAAATCCATACTCTGTTAGGACTGGCCGAGGACAACATCGCGGAAGAAAAGCCCAACGGCATAATCGCGACCGTTTTGATGTGCATTGGACGTTTGGGTGAGCTAATCATGTACGCAGAAGAGGATCATTCCATACTAGGGTCTAAGGAGTCACCCGTTCATGCCCTTGCCTTCTGCACGGGGCTTCTACCAGCCGCCGCGTTAGTCGCTGCCAGAGATACAAGTGAACTATTTGATATCGGTAAAGAAATAATCTCTATCACCTTTCGTATGGCTTACGAAATTATACGTCGTATGAAGCTTATCGAGGACACAAATAGGAGTTGGGCAACTACTATAGTCGGCGCGACCGTTGAAAAGACCCAACCAATACTGGACGAATTCCATAGGACACAGAAGATACCACACCCTAAAAGAGTAGCCATTGGTGTACTATCTACAGGATGGTTAACCCTTATGGGGGCTCCCTCCTCACTTGCCCGTCTAATGGAATGGAGTAAAGAATTGGATGAAGCTCCAAAGATTCAGACGGACACTAACGGTGCGGTGCACACCGAATACATGCCAAGGTTTGATCTTGATCAGGTTCTTGGGGACAGCCCCTTGTTAAAGATCCCCATCACTAGCAAGGCCCGTATGATCAGTCCGTCCAGTTGCAAGCCGTACTCTCACACTACACTTAGGGACCTGCTGGCTGAGATTTTAATCGACATTGCTCATAACATACTGCACATTTCTGGGACCGCCGAGGAGTGTATAAGCGGGTTGGTTGGCAAGAGGCCGGTTTCCCTGACGGTAGCTGGTCCCACCGGACATCTTACAGCGGTCCAGAGGGTACTGCAAAAGAAGGGGATAGAGTACAACATTAGAGAGCACGATTCCCCTAAAACTGATAGTATAAGCCGTGGTGGTTCCGATCTAGTGGCGATCATAGGCATGGCGGGTCGTTTTCCGGGAAGCGAGACTATCGATGGGTTTTTTGAAGATCTATTAGCCGGCAAAGGTCAGATCAAGAAAATACCTAAGTCTAGGTTCGATCTTGATGTATATTATGATCCCACGGGCAAGAAACGTAATACTACGTCAGCGCAACATGGGGCGTTTCTGGATAATCCTGGCCATTTCGATAATAGACTATTCAACATCTCCCCGAGAGAGGCTGCGCAAATTGATCCACTTCAGAGGTTGCTGTTCACTACTTCCTACGAGGCTTTGGAGATGGCAGGTTATAGCAAGGATGCCACCCTGGCGACGGAATCCAACCGTATCGCCACGTATTTCGGCCAAGCCTCCGAAGATTGGAGAGACATACTAAACAATGAAGAGATCGATATTTACTACGTGCCTGGCTTAAGCAGGCCCTTTGGACCGAGCAGACTGTCTTATCATCACAAGTGGGGCGGGGGAACCTACGCTTTAGACGCTGCATGTGCCACATCAACAACGGCAATCTCACTAGCTTGCTCTGCCCTGAACGCACGTGAATGTGACACTGCTCTGGCGGGGGGCGGCTCTATTCTTGTATCCCCAAAAACATTTAGTGGCTTAAGTAGATCAGGAATGATTAGCAACAACGGTGGGTGTAGGACGTACCATGACGACGCAGACGGATACGTAAGAGGGGAAGGTATTGGAGTAGTTGTATTGAAAAGGTTAGAGGACGCAATCGCGGACAACGATAATATTTTAGGCGTCATTCGTGGCTCCGCTAGAACGTACACTTCCACGAGCACGTCAATTACGCATCCTTCAGCAGAGTCACAGGCTAGGATATACGAAGAGGTTCTTAGACAGACGTCAGTGGTCCCAAATGAAATCGCCTACGTTGAAATGCATGGAACCGGTACTCAGGCTGGTGACCTGGAGGAGATCACATCCGTAATTAAGGTGATGGGAAGAGGTAGATCCAAAAATAATGTCCTGACAGTAGGCGCCGTCAAAGCAAATGTTGGCCATGGAGAAGGAGCTGCGGGTGTAACCTCTCTAATCAAAGTACTAATGATGATGCGTGAGCGTAAGATCCCGACCCAACCGGATATCCCTTTTAAGCTGAATCACAACTTCCCCAATCTAGAGAGGCTAAATGTCAAGATAGCTGGTTTTAGTGGCAAAGATATGACTCTTAAACCGAGCCCGGCGGCCGCAGACGGCAAGATCAAGGTCATTGTAAACTCATTTGATGCATCAGGAGGTAACACGTCTCTTGTAGTAGAAGAGCCACCCAATCCCCCGTCAAAGCTGGAGAATCCCCTGCCCTGCCATGTAGTTGCTATTTCTGGGCGTACGATAACGAGTTTGCAAGAGAATCGTCGTAGATTGCTTGATTATCTAACGAGGAACCCATCAACTAAGCTAGCAGATATCGCATATACAACCACAGCGAGGCGTATGCACGAAGTTCTAAGAGTAGCATACACGGCCCGTAGCACACGTGAAATCACAAACCATCTTCGTGCCGATATTTCAAAAGAGAAATCAACGGATCCTAAGTCAAAGCCCCCTTCTATGACCGTAGTGTTCGCGTTTACCGGTCAGGGTAGCCAGTATGCTGGGATGGGTCGTCAGTTATACCAACATTCAAGCGCCTTCAGGGATATCCTTCATACATACCAGATGATGGCGGAACACCAGGGACTGCCTCATTTCCTGCATATAATTTCCGACGAAAAGGTTGACATAACCGCCATTCCCGCAGCGTGCGTCCAACTAGCCATTGTGGTATTAGAAATTGCCACCGCTCAGCTGTTGAAGATATGGGGTGTCAAACCAGACCTAGTTATGGGTCATTCTTTGGGAGAATATTCTGCTATGTGTGTGGCCGGAGTCTTATCAATTTCCGACACGCTGTTCCTTGTCGGACAGAGGGCTCAACTGATGGAACAACAGCTGGTTGCTGGAGAATACAGTATGCTAGCAATAGGTAAGGATCACCAGTCAGTGCTTCAGTTACTTAAAAGTGGGAGCGAGAACGGCTGGAATAACACAGCGATAGCTTGTATCAATGCCCCACAATTGGTCGTGGTTAGCGGACCCATCGGCGAAATAGAAATTTTAAAGGCTAAAGTCGAGGAGGGTGGGAGCAGGGCCACGGTACTAAAAGTCCCCTATGGCTTTCACTCTCACCACATCCAGCCTATCCTGGGAAAGTTTGAGAATATAGTTTCCGGTGTGACATTCTCTGCACCTACAATTCCCATCGCATCAACATTACTTGGTAAGATAGTCGAGGCAGGACAGGGAGATGTATTTAGTCCATCCTATCTAATCAGGCAAGCAAGGGAATGCGTAAATTTCGTGGGAGCCCTTGACATTTGTAAAGATGACGGCTTCGCCAATGACAGGACTCTGTGGATCGAAATTGGGCCGGAACCAGTTTGTGTGGGTTTGATCAGGCGTACATTGGACGTCCCCAGCCCTCACTTGTTACCCATTATGAAGAGTAGCGAAGACAATTGGGTAACGCTAAGTTCTGCCTTGGCTACCTTATACAAATCAGGGGCTTCCATCAACTGGCCTCAGTATTATAAGGAATTTCAAAATTCCCTGAGCTTATTAGCTTTGCCCACCTACGCTTTCGACGAAAAAAACTACTGGACCCCCTACGTTGAACACGCAGCGGCCCCTGCGGGGTCCCCGCATACGACCGAGATGAAAAGTGGTCCGTCCCCGACCGTAGTCCCCTCCTTATCTACTCACGACCTTCAATGGGTAGAAGAGGAAAAAATGGACGGGAAATCAATCACGGCATCTTTCGCTAGCCAGACGTCAGAACCTCATTTGTATAAAGCTATCCGTGGGCATGTCGTCAATGGTCTGACAATATGCAGCCTTTCTATTTTTTGTGGGATGGCTAAGAGCGCCGCTAACTATGCTTATTCAAAGTTGCATCAGGGTAAGATGATTCCTAATATGTCTCTATTCAATGTGGACATGACACATGCGCTTGTCGTTCCGGAACTGAATCCGGAGCAAATTGTGAAGACCACAGTATCATACTCTAGCACGGGTAATCGTGCTAACATTACATTTCACAGTACGAATGCAGGTATAGCGACGCAGCATGGTACATGCCAAGTGGTTTTCGAAGACTCTAGTGCGTGGTTTTCTCAATTGTCACAGACTCTGTTCCTTGTGAACACACGTGTCGAGAGCCTTAAAGAGATGGCCACCAGGGGTAAATCTCATCGTCTATTAAAACCGGTAATCTATAAGCTATTCGAGAACTTGGTCGCCTACGACAATAAATATCAGGGGTTAGAAGAAGTTTGGCTAGACGCGGATTGCCGTGACGCAGTCGGCACCGTGAAATTGCCGAATACTGTAGGTAGCGGAAACTTCTTATACAACCCGTTTTGGACGGACGCGGCAATTCACCTTGCCGGATTTCTTTTAAACGGATCTTTGAAGTACCCAGAGGACATTGCCTGCTTATCTACCGGTTTCGAGTCTTGGAGGGTGCTAGAGGAGCTACAAGCAGATGGGATCTACACAACCTACGTAAGTATGCAAGAGACCGAGACGCCCTCAGTGTTGAGCGGAACAGCGTACGTTTACAACCATGACAAATTGGTTCAGGTGACAACCGGCATTAAGTTCCAGAAGATGAAAAAGTTGATACTGAACAGTATATTACATCCAATCGCGCCAGCTTCCACCGGTAATAAGAAAGCTGTTGTTAAGTTACAAAATAGATTTGAAACTCCTAAGCAACCAGAGGTGAGTGCTAGAGGGTACGAGACCCCAAGTTCCCAGGAAGACAGTGATTCATCATCTGAAAAGGGTGGCCTTAACGGAACTTCTACGCCCACGAGTAGCCTAAGCGATAATGTCGGATTAAACCTTGTAGAGGCCTTCCTTTCTGTAGTTGCTACCGAAAGTGGTTACAATGTCGCAGACATGGAAAGTGCAACGGCGTTCGCGGATATGGGGATGGACAGCCTGATGTCCATCACGATTCTAGCGTCCCTGAAAAGAGATACTGGAGTGGAACTGCCAGCGACCTTTTTGTTGGACAACCCGACGGTTGGAGATGCAAAGGCAGCGTTGATAGAAGAGGCAGATAGTGAGGAGTCTATAGCCGACTCCACTCCACTGGCGCCGAATAGTGTTGAAGCTCCAAATATACCGAAGGTATTTGAAGCGCAAGAACCCTTGGAAAAGGTGTTCAGACAAGAAGAACAAGAAGAAGAGCAAGCACCTAGCTTTCAAAGCACGATCGTAGCGATAGTGGAGGCTACGAATCCCGGTAGACTAAGCAAGGCTATGTTATTACAGGGAACGCCGTCTTCTGCTGGCCCTAAGCTATTCTTATTTCCCGATGGGAGCGGAAGCCCTTCAAGATATATACAATTACCAACCCTTGGAACGGACATCAATGTATATGGCCTGGAAAGTCCTTTCGTCAAGACTCCGAACGAGTACATCTGTTCCATAGGTGAGTTATGCGATATGTTCATCGCGGCCTTAAAAAAGGAGCAACCGACTGGTCCGTATGTTCTGGGCGGCTTTTCATTAGGATCAATCTACGCTTACGAAGTAGCCAGAAAATTATTGGAAAACAATGAGCAAGTTAATGGACTTCTGATAATAGATATGGCTATTCCGAAGATGCTGAACGTCGGCTTGAAGCCAACGTTAGAGGAGGTAAAGGCGGCGGGGCTAATACCCGCCACTGGTCGTATATCAACAGCACAGAAAGAACATCTTCTTAGTACAATAATGGCTATGACTAAGTATCATCCTACACCTTGCACGAGTGATCGTCGTCCTAAGAAAACGGTACTGATAAGTTCCAAAGCCGGTCTAGGGGTGGGTATGCAAAGCGAATTGGCACAGTGGGCGCAAGGAAGCGCGTCCGAAACGAGGGGGTGGGAGGAAATGGTGGGTCCGGTAGAGGTCCACGAGATTGAAGCAGAACATTTTTTCCTATTCAAGTTACCCGCTGTTAAAGGACTGGGTGAACTGTACCACATGTATTTCAGAATTCTTTCAGAACCGAATCATTGCATAATGAGTGGAAAAATATCAAAGCCTGAGGATGCGTCAGTATTCGGACCGGACTCTAGTAGGTGGAAATTTCCCTTCTGGTTCGTTAATTATTATCAAATTATCTTCTTCTCCGACGGGATCCTTAATATGGGCGACGACAGTACTCACTTCATTGATCTTCAGATCCTGCTACTAATTCAAGAAAACTCTTGCAATGCCTCACCGCAACTTATTCACCATCGTGAGCCAAATATGGCGAGCAAGCTACCTAGTGACGTGACATCAAAGGACGTTGCGAGGGCACCTCCAGGTATAAAAGATAACGACAGAAGAAAAATATGGACGCCAGTAGCGAAAGACTGGGCGACGTTTGAAAAGTACGGTCGTGAGACAAACGGAGAATACACCTTACTGACCGTTTCCGTCGCCCCTGGTGGAGAAAACGCCGCACATTGGCAAGGTTCTTATTCCGAGACCTTCACCGCTGACATCGGGCAGGTGGGTATCTATAGTAAGTCTACGGGAAAAATGATGTTGTCTCCTGGCGAAAGTGTAACCGTCACTCCAGGCGAAGTCCATTATTTCTTTAATCCCGGCAACGAGGATGTTGAGATGAAGATCAAACTTCATCCAGCTCGTGAGGGATTTGAGAAAGGATTGTATATATTGTATGGTTTAGCCAGAGATGGTAAGTCCAGTAATGGAGGTATACCGAATAACTTCATGTATTCTGCAATTATATTCACCATGTCCGATATGTGGCCCAGCGGACTTGGAGGTATGATCCTAACCCCTATAATGAAGATTCTAGCACGTGTTGGCAGACTTTGTGGGGTGGAAGAGCAATTAGTGAAAAGGTATTGGGAC

SEQ ID NO: 9 - DNA, 1074 bp, Artificial Sequence
  PKSC3C
atgtcctccgctactactaaaccatcagacacagagattatctttggaataattgctcaggaagtgggggtgacaagggacgaattggaaggtgagacggagtttgcagatttaggagtcgacaatctgcttgcaaaaagtatcctggcacaaatattggatgaaaccaaggttcgtctacctgctacgactttcgacgaccatcccactgcttctagccttcactcttacttgcaggaaagcgtgaaacacagcaccgcagacacaccgaagaaaatagcgtctaccggaagcccggcctcagcaaatccgttatcaataatattgcaaggcaagcccttatccagtaacaaaaaaattttcttgttgccggacgggtccgggagtggaatggcttatttgagacttcccataattgacccgagcgtatgtttgatcggcatgaactccccatttgtacagagctctggtggagaatccttcaccgtggagggcatagcagagggttgggttaaggaaatcagacttaggcaacccgagggtccttatattttgggaggatggtctgcgggcggttactacgcgtttgaagtagcaaagatattggtgcgtgcaggtcagaaggtagaaaagttgatcctaattgattcaccctgcagattggtttttgaagaactgcctatggaggtggtacactacctgtctactaataaccttatgggcaactggggctcaaaaaaaccaccttcctggctagtggaacactttgagatgtccatacgtgcaattagtgagtatacaccgacaccaatggacccggagggcctacccgaggttttcataatatgggcagaggatggcgtattaaagaatgtggatccaatttctaccgggctggattttaatgtgaaagtaacaaggtttctaattcaggagagggacggtgtcaagccccacgggtgggagaggttattcccaggagccaagctaagcatcgcgacgatgccaggcaaccacttcacaatagtttatcctcctgaaggatatgtggccacggagagaacgacagaccaa

SEQ ID NO: 10 - DNA, 7251 bp, Artificial Sequence
  PKSC4A
atgtcttctgggtctttggtgccgacgagggacgatgtggctatcatagggatgtcctgtcgtttccctagtgatgccgatacggcagaccgtttctgggattttatctgtcaaggtcgtaacgcatacgctgaaaacccttctagatgggcagccaatgccttccatcacggcgagaaaaagatcaacacgtcactgacacgtgggggtcatttcatcaagcaagacgtggcagcctttgatgctaactttttttcattatctaaaacggaagccgagagcatggacccccaacagagaatgataatggaagtgacgtacgagtctatggaatccgcgggcctgcgtatagaaaatttggccggatccagaactggcgttttcatggcatctttcacctcagactaccgtgagttaatgtttagggatgccgagaccgccccactgtacaccgctaccggcacctctaatacgagcactagtaatagggtaagctggttcttcgacttgagaggccctagtttcacggttaacaccgcatgttctagctccctggtggcttgccaccttgcgtgccagtctctgtggtctggcgagactgagacggcaatcgtaggggggacgagtcttctgttgaatcccgacatgtttttgtacttgtcaaaccagcaatttttggctccagacggccagtgcaaaagtttcgataacgctggcgatgggtatggaagaggggacggcattggtgttgtgattctgaagcgtgtggctgatgccatacgtgacggtgacccgattcgtgccgtgatcagaggttcaggctctaaccaggacggtcacaccaagggtttcacgatcccgtccgtggaggctcaagcctctttaattgcagaaacataccgtaacgctggattgagtcttgctgagacgagatatgttgaggctcacggcacaggtactcaagcaggggataccagggagatggaagggatcgcacaaaccttcagtaagcacagggctgagagtgacgaacttctggtcggcagcgtcaagagcaatattggtcatctggaagcgtgtgcgggacttgcctctcttattaaatgtgtctatatccttgaaactggcgtcatccctcccacaccatccgttagacttttaaatacaaagatcccctgggctgaatggcatttaaaggtgcccagcaccaggacaccgtggccaaaaaccgggttgcgtagattgagcacgcagggatttggatatggtggaacgaatgcccatctgatacttgatgacgcagcgcattacttggaggaaaggaatctgcgtgggcaccactacacttcaaccgaaatcccccatgcccagagacttctggatgactctccccagaacaaaaaaagacagatgctgttcttgttcagatctaatgacagagagggcctaaggcgtgtcaggtcaagcttagagcaacatctgagaaacagattagcgtctgtccctcaggatgggggggattaccttcaagacttagcctttactctagcaaaccgtaggtctttgctaaagtggcagacatttgctgcagctagtaccgcagaggaactggttgacctgctgaagaaggacgacaatagctggaccgcgccagtcgccagatgtactactgaacctccgaggataggctttattttcacgggtcaaggggcccaatgggcgcgtatgggagtggaactaatggaatatgcaatattcagaaaatccgtggaagagtccgacttatttttaaggcagacccttcactgcccctggagtgccgccgaagagcttgcaaaatctcaggatacttcacgtttaagtgaagccgcctacagccagactctttgtacggttttgcaaatcgcaatcgtagatctttttgaggactggaatgtggcccctactagagttgctggccatagctcaggtgagatcgctgcggcctactgcctgggcgctctatcaaaacatgactctttgagagttgcctattaccgtggagtcttgtcctcagagatgcgtcaaacacataaggaccagaagggcgccatgatggcaatcgggtctgggccggagcgtgtcgaagagtggctgaaacaacttacaaagggccgtgtggtcgtcgcttgcatcaatagcccaaaatccgtaaccgcttcaggtgatgcagctgccatagacgagctaaccacgatagtggaaggtgcaggtgtttttgggagaaaactgcaagttgacgtagcctatcactcacatcacatgcaaacagttgcaagcgcttatgcagacctattgaaaaatgtcaaaccgctacccgcaagggaagggaggtctatgcatagctcagtgcttggacgtgccattgatgcgactagtttgggagcgagtaattgggttagcaatttggtatcaccagtacgtttttccgatgcgatttcagacatgctttacgatggtgaagacctagctttggacttcttagttgagataggaccacaccctgctcttaagggccccgtacaacaaatattacaaccacatggaccatctgctttggcagttaaatacgcttccgtcctaacaagggggcacggcgccgtcaagacggcattagcttgcgtcggtgaatgcgtgttgagtaatgttccggtcgacgtcgcccgtgtgaatggcggtattggtaatcctaggcccgtcgtcgacctacctccgtacccatggaatagatctaccaggttttgggctgaaagtaggttatcagaagaatatagacttagaaagcacgcgaggctgcctttactggggtgcccctgtcccaccatgggcgcgcgtgagagatactggcgtggtatggtgaggttggatgaagaaccatggataagagaccatgagattcaaggttccatcttataccccggggcgggtttccttattatggccatagaggccgcgcttcagcaggctgacaacttaaggactgttgcctcctttacactaagggatgttcaccttgacgctgctcttgtggtaaccgaagactcaatcgtcgaggcaatcttacaattgcgtccacacttgctagccccaggctcttcacagagcagttggatggaatttaccgtgaattctagcacggatcgtgggccattgaggcagaactgttctgggttaataatggtagagtatgaagttgacgcagacagcgacatgggacgtgaatctgcattggagtctgctgcggtcgtagatttttataaagagacacagctttcttgtaggaagacggtcgacgtggataaattttactctcgtcttgactccctagggttgtcttatggccccacatttgctaatgtgacagccataagacgttcaggtgaagggaaatgcgttggtagtcttagggtccctgaggtcgacagtgcagtcccccccgcgtacagttctcaccctcacgtgattcacccaaccactctagacgctgtgtttcatttggcgttcgcggctctggaggatgcgttactacctggtccgatggtccctacgaacatagatgaggttgtagtggccgcgaatgttccgaaccgtccaggaacacttttacgtggcgtcagccagagttcccctcatggtttccgtgaattggtctctgacatatccatgctggatgacgagatgtcaagaatggtagtccgtattaagggtttcagatgtgcggacgtgagtggtggcaacatgacatctctggaagcggtagagacgagacctatcggttttagacttgagtggaagccggcagtcgaactgctaccagacgagaaacttaaacagtttattggcgatgttgctgagaagcgtacggattccaagcttgctagagccggggaactgaaaaacgaagccagacatattagcgaagagcttggacagaccgaaaatcttccgacccctgatcaacaagatcaatggttaaaggaaatggaagattgcggtgtccttttcgaattagctcaggcccttgatacaactgcccagtttgctataagtgtctgccaggaatccgcggtagatcgtataaagggatggtttggcagcaaagcctcagccatagatgtagtcgtcgctgactattcaacaaaattggataagagcagcgaaatgcatgacgtcatcattgtcttcgatcccgggtttgtatacgcgaagcaggacgtggttctaaggaatgcgaggaaattattaaacccagggggcacccttgtgatagcagaaataaataaacccgaagccaatcttaccacggccttgagggccttgcagtggacccgtaacatcgactctacgaaatctatctgggccagcagtttttccaggttaggccttacgcctagcctggacctaatagacagtaccgcttccgggtatggtaggtccacacttagattaaccgctaacgtgtctccgtctggtcttagctcagatggtcaggcaaagctggaacacgtatctatagtagtaagcgcggccgccagtagcagggcccagagggtcgcatctgctatagccacacgtctggaggagtcttgcaccgtgcacatagttagatggggtccagatgctagcaaattgaaaggacagacctgcatcatattgacggacctggagagcgctctactaaaggacctggcatctgaggacttaacaaatttacaaacattgctgtcactagccgagtcaactttgtgggtcagcggaccattaggccctgatgctgccctaataacagggctggtgcgttccgtcagaaatgaagcagtgggggtacagttgagaactgttgaaatgaccgacgtcccccttagtgaggcggaagaatacgcggacgccgtctccaggattttccactaccgtgggagtgacgatgagtttcaagctcgtcaaggtacccttcaaatatcaagactggtagaagatgaagagagaaatatggaacttgcccaactacttgggcagggggagaaagcagctgtagcgacgactttacaggagaagccagaggcattgaagctgtgcgtcagacaaatagggatgctggactccatctgctttgagccggatccattaagtcgtgaacctttaggagcagaagaagtcgaaatcgatgtgaaggcgagcggcataaattttagggacgtaatggtcgctctaggacagattcccgaccgtgcattcgggtttgaaggggcgggtgtagttcgtcgtgttcacgaatccgagaaacgtcttcgtccaggtgatagagttgctttcttggcacatggagcccataggacggttcacagggtaaggtcaggtttcgcgatgccattacctgacactatgagttatgaagaaggcgcagctattcttctggttcatacgaccgcttggtatgctctagtcaagacagctagggctacccccgggcagtctgtattaattcacgccgcagctggcggagtaggacaagcggtattgatgcttgctagacatctgtctttagaggtgtttgcaacagtgagcagcgaagaaaagaggaagcttgttcatgaggcctacggggtgccgcatgatcatatatttaactcacgtgacgtttcctttgcacttggtgttaagaggatgaccagagatagaggtgtagatatagttgtcaactcattagcaggggaggcgctgagaaagacttggcactgtctagcgccctttggcacgttcgtggaattaggaatgaaagatattctggataatgctaggttggacatgcgtccctttttgcaagacgcgacattcgtattcttcaatttgaaccgtgtccagaaggaacgtccggaactacttcaggaagcacttaccgaaacaatggcgcttgtgaggagtggagctttaaagcccgctgttcccttgacggcatatcccgcctcagacgttgagaaagcctttaggaagatacagacaggacaacacttaggaaaactagtactaaccttccaggcaggtgatacagtaccagttgtccgtcccgatttgagcctgtccgactcaggcacatacttattagtagggggccttggcggactggggagatccctggctaggttgctagttagactaggagcaagacgtttgtgctttctatccaggtccggcgctaagagttctgaggcacaggcgctagtggaagaactagcctctcagcatagggtccaagtactggtaagcgagggggacgtatccgatgcggctgtcgtctcacgtacagtagaacaatgtaatacgaaactgggacctatacgtggcgtttttcaatgtgctatggtcctgagagacgggctgtttgcatctatgacccatgcacaatggaccgaatcaaccaggccaaaagtgcagggcacttggaacctgcacgcgcaaataccaaacgcagatttctttataacgctatcaagtttcgctggtgtatttggctctagagggcaggctaattacgcagctgccggtgcctatgaagatgcccttgcacaccatagagatgcgggtggccaacgtgcaattacattggatctgggaataatgagagacgtgggtgtattggccgagaccggaattacggattacctacgtgaatgggaagcgccattcgggatcagggagcctgagttccacgccctgatcaaatcagcgatattagcaacaacccaacctttaaaagaggggactagttcacaaatcccaacggggctagcgactgccagaagtgcgcaagccgccggtattgctatgcccttttacttcgaggatagcagattctccatactagctcaaacacgtgcgagcagcgcaggggcttctgccgcaggcgacacggacagtaaacttagcgtaagagtgcaattagctcaggcgcaaactatcgctgaggccgccgcggcggtgcaagctgtacttgtagaaagagttgcaagaacgctacagtcaaacgcctccgagatagacccttccagacctcttcattcctacggggtggattctcttgtggccgtcgaaacggtaaagtggatgttcaaaactcttgatgcaaaaatgacggtgttcgatatactgagcaatgtttccatctccgtcttatgtgagaagattgcctccgccagtgcacttgtcaaacttggg

SEQ ID NO: 11 - DNA, 5247 bp, Artificial Sequence
  PKSC4B
atgagtagtaaaagtcatgtaacaaatttcttattttttggtgatcaaaccgtagaaaaacttccggccataaggcaattagtgcgtctggcaccatcttcaaggctagtccaacgttttctaaggcaggcgtgcgacgcagtacaggtggaggtgggccaactgccgactcacgccgaccagcgttccaatataggtaatttcgattccatcttgaggttggccgaagacaacgaccagcgtggcgcgccgtccgaaatagtagcaaccgtcttaatgaatattgcgcgtatcggagagcttatattatatgcagaagatgacccgagtattttgtcacgtaagggaaacaggagttgcatcctaggcttctgtacaggagaattgccggctgcgatagctgctgtcgcacaggacactactgagctggtagacttaggtgttgaagcgacgagaattatattcagaatggccagggagctgaatcaccgttccttgatggttgacaggacgaatgggccctgggcgaggacgctgcttaatattagtgctgaccgtgtgggtgcaatcctaaaggaattccatgaatcacaagctataccgagagcacgtcaggtatgtataggcttcgtaagcgagggctggcttacattattcggccctcctacgaccctggaaagattatttgactggtcagtagaactggaagacgcgcctcatatagataccgatgcaagggggggcgttcatatggagactctaccagaggttgacgtgggaaggattttggggtcatcatcatggcttgaacgttccctggacccagctacgacaataatatccccctatacttgccagccaagacaacatcgtaaactgcgtgccctactggaggaaatcattctagacgtaggccaaagaaccctatatcttgcggcagccatgaatgcggctttggagttgactaaaacagagaagcttcgtgtggtaatgcctggatatacttctcacgacgtctacctaaagaagttgcttcaaaagaggggtgtagagtacacagttgcgtcacattcagatcgtcccgctcttacgacgggaagggaaggaagcggtttggtagccgtcgtaggtatgagtggaagatttccgggtagcggaaacattaacgagttctgggagggcctgttacaggggaaaagatacgtacaggaagtcaggagatgcagcagacatattgccaccatccatttatgcggtgatcccagactaaccagacactggcagataccgccgtcaaggttcaaccttgatgagtggtatgatacgacaggaaaggaaaagaacagcaccatggctcgtacgggcgccttcctagatcagccgggattatttgataacaggttgtttaatatgagtccccgtgaagccatgcaaacggacgtgcagcatagactgcttctaaccacgagctacgaggcattggaaatggccggttactatccggacgggacgccttcaaccaatcgtgaacgtatcgcctccttctttggtcaaactagtgatgactggagagaggtcgtcgtacatcaaggggtagatatctactttgccacaggctcctgtagagcgttcggtccgggtcgtctacaccaccacttcaaatgggggggcccctcatattctgttgactcagcttgtgccagcagcgtagcggcggtcggccttgcgtgttcagctcttttgggaagagaatgcgatatggcgctggcgggaggtggtagtctattgctaagtcccagcccattttctgggttgagcagaggaggcttcctgtcaacacacgggggctgccaaaccttccaggacgatgcggatggctacgtgagaggcgaaggaatcggagtagtggtcttaaaacgtttagaagatgcgctggaagaccaggacaacattctgggtatcgtcaggggttctggcaggaattatagctctgacgcatccagcatgatgcatccctcagccgcctctcaacaaaagttatacagatctgtcttagaacaatctggtgtggaggctaacagtatctcttatgttgaaatgcacggcacagggacccaagccggagattttatggagatgtcatccgtgttatccatctttgctgaaaagagagcttctgacaacccgctaatcgttggtgcacttaaagcgtcaatcgggcacggggaggcggcggctggtgtatgtggtcttatcaagactctaatgatgttacagtccaggcaagtacccccccaacccagtctacctggtccaataaaccatagatttccagatctggcgtccaaaaacgtgtacatagcgagcagggatatgtccctaaaagcctctccttcagcgaagggaactatcagagtatttcttaactctttcgacgctagcggaggtaacagctgccttttactggaggaggcgccccccagagtcgagaaaccggcggaccctcgttcccatcacgttgtcacgctgagcgggcgttcacagaaatcactgttaggcgccatggagaggtatttggcacatctaagggaaaatccggggatacaacttgccgatttagccttttccactagcgctagaagaatccacggtcttctgagatatgctatcactgcatcatcagttgagcaggtaatccactgtcttgaagctgacctagcggaaaaaaagaccccccgtcaaccacctgtcacatccactgtaatatttgtgttcacaggtcagggatcccactatccatctatgggctcccacctatgggagacttcagcaactttcagagctaaacttcatgattttcaggcagtagcaacagcccaaggattgccctacttcttggatctgatttcccgtagtacgactgctgaaccaagaagtgacccagatacggtgcaaatccaattagcgatattgtctttggaattggcgctagccgcactgtggaggagctgggggatcgaaccaagtctggtcttagggcactctttaggtgagtatgctgcgttgtgtgtggcaggggtactaactgttggtgatgccctttaccttgttggtacgagagcaagaatcatggcggggactttaactgtggacgagtatggaatgttggcagttaatatgggttgcgacgatgtgagaagtttgctggcaactgggcagcatacctcctgtgctgtggcatgcattaatgcttccaaaatgacagtagtatctgggccacaatcaaagttagaaaagctgcaaatgcaacttaagagtgacggtatcaggtgcacacctctttcagtgccttacgggtttcactcacctcaattagatccgatcctggctcaattcgaagaggcttgccacggcgtcgtgttcagcaccccacaggtgcccatagtgtccactctactagcaacggtgataagaaaagaggggacgtttagtgcagagtacttagcaaggcaagcgagagagcccgtggactttgtaggagcactagcggtcgtggacgaacagaaatatgctttcaaagtgtttttggagatcgggccggaccctatctgtttaggattagtaaaggcgactttaggcattaaagaagcgaagcttagtctattggcatctatgcatagggacaaggacaattggtcctccatatcatgcagtttgcgtgatctgtatatggcaggggcttctgtagactggccggcatttcatcgtgacttcaagtctagtgtatccttaatcgatctgccaacctacagttttgacgagaaagtattctggagtagttttcctgggagagaacctcagccagctaaggatcttgaggctagaaggagaagcgattctgggattgcccccagcgttcaaggatttgggacgaccactttgcagagagtgttaaaggaaaccgtactggcggacggttgttccgtgacctttgaatctgaccttgcagactctcatttacgtgctgctgtccaggggcacagtgtcgcggacgttcagatctgctcttctagtttgctgctggacatggcactaagtgccgcccaatatgcatacagaaagcacatggccggcagagcgatgccctctgaactggtcgtcagaaattgctattttcatagagcattggtgcttggggaaaaagaccaacgtctacaagtgactgctactctatcctcctcagagacacttgtcgagattgaatatcactgcttaactgccgacgaaaacttcgaacttggtgcctgccaagttatacttgaaccagcggctagacccccccaggcggcttttttagttcgtagtcgtatagccgccctaaaggcaagtgccggacatcagttaggcagattagcagtgtaccgtttgtttgacagtgtagtccgttactcagaagaatacaaaggcctagaaaaagtatatttagctgaagaaatgcaggacgcagttggccagatctccatggcggacgtaccggcggctggtgggcattatctacaccatcccttcttgctggacagcgtggtacaccttgcggggtttcttgtgaacaatggaatgcgttactcttctgactgggcatgtctgtccaccggtttcgacgaatggcaccagttcaaagctcttgacccaagcgtagtttacacctcttatactttcatggaagacagtgcctcaaccaataacgtggttgcgggcgatgtgtacgtctttgacggagatgaattggttagcgttttaacaggcctgcagtttcagaaaatgaagaggaccgctcttcatcacctactttccccatcatcagctccgtctactggacgtagtatagcgagtcgtgccgcgcctgtagcctctggggcaacaccagctgccagcaacagcgctctacccacacgtaccgtggcggattacgaggcgccgacgcctccgacgaccgtggacgactctgaagcggagggagcgaaggtcgacctagttaatgccctttttagcatagtggctcgtgaagtgggtgtggaaatgtccgatttgcatggggatgtcaatttggcaaaccttggtatcgactccctaatggccatcactattatttctgtcatgcagcaggagactggggttgagttagcagggacttttttcttggacaatagtacgacaacggaggtcatcgccgccttgagaggcgcg

SEQ ID NO: 12 - DNA, 1134 bp, Artificial Sequence
  PKSC4C
atgagctcagcggtaacgatgtggcagggggcactaaaaattatagcacaagaaagcggcttagagccgggggagattatcgagacagaggacactgagtttaccgctctggggatcaaccgtattctagctactgccatattgagtcatctgagaggaccaagaggtgaagcgttgcctcatgatatctttgatcaaaagccaaccgttggagcctttagacgtttttatgagagtccaatcgtgttgaatgtaacgccgggccacggcgtgggtcacacaccctcaacaagggctaaacagtctagggccgcgtcaagtattccattgagtatagttctgcaaaatacaatcgcatcttcttgtcatacggtctttcttctgcccgatggcagtggcagtgcaatggcttacgcaaacttgccgcctgtacacccttcagtgtgtgtcgttgggatgaacagcccttaccttagaaacacaggcgcatacaggtgcagtctagaagagttggcctcacagtgggtttctgagatttaccgtcgtcagcctcatgggccctacatattggggggctggagtgctggcggctactatagctacgaggtcgcaaaaaggctactacgtgacggaaatgtagtcgagaagcttattctaatcgatagcccgtgtcgtaccgtctttgagtccctttccatggaagtcgttcaatacttgtcttcaagaaacctgatggggaactggggtacacagtccccaccagactggttgattgagcactttagaagtaccttgacggcagtagggaactatagaccgttacccttaggtagcgccgggggcatggaaacttacattatttggtcccgtgatggtgttctagatgataaaacacttgcgaactcaggtatggatacgaccgtgaaagtctccagatttctgctgcagggcaaggacgaccttgggccaaatggatgggagcatttactaccgacgaaaaacatggcaattgcgacgcagtccggaactcattttactatggttaacgatccccacgtccgtatttgcttaactaagtcaccgagaacaagactaaccaacgacaccggaggaaccgacgaaagggttgcggcg

SEQ ID NO: 13 - DNA, 7551 bp, Artificial Sequence
  PKSC5A
atgagtagccaagctccagctcctagtagggatgacatagccgtagtaggcttgagttgccgtttccctggtgaggccgatactgctgagcatttttgggacttcatttgcaatggacgtaatgcttatagtgaaaaccccgacagatggacgccagatgcgttccactacggagaaaaaaaaattaatacgtcattgccccgtgggggacactttatgaagcaggacgtagccgcctttgacgcaaatttttttaatttgtctaaggtggaggcagaatctatggatccgcaacaaaggatcatcatggaggtgacctatgaatcaatggagtctgcgggtctacgtgtggacgagttggctggctctagaacgggagttttcatggcctcttttacatctgattatcgtgaaatgttatacagggacgctgagaccgccccgctatatactgcgaccggtacatccaacaccagcacatccaacagggtatcctggttcttcgacttaagaggcccctcctttacagtaaacactgcttgctcatctagcctagttgcctgtcacctggcctgccagagcctttggtcaggagagactgagagcgctatagttggaggaactagcttgcttctgaaccccgatatgttcctatatttatctaaccagcagttcttggctcccgacggacaatgtaaaagctttgatgaaagtggggatgggtatgctcgtggtgacggaatcggcgtcgttatcttaaaaagagtcgcggatgccttgagggacggagacccgatacgtgcggtcattagaggtagtgggtgtaaccaagatggccacaccaaagggtttactattccaagtgtggaggctcaggctagtcttatcgctgaaacgtaccgtaatgccggtttgtctttggcagagacaagatacgtagaggcacatgggacgggcacccaagcgggtgatactagggaaatggaaggcatagcgaggacgttttcacagcacagaacggctagtgacgagcttctagttggatccgtcaaagctaacattggacacctagaagcttgcgctggactggcaagtttaataaagtgcgtttacattcttgagacaggcgttataccccccaccccctccgtgagggtcttgaatcccaaaatcagatgggaggagtggcacctaaaggtaccagcaacccaaacgatctggccaacggaggggttgaggaggttgtcaacgcaagggtttggttatggtggaacaaatgcacatcttatacttgacgacgctgcccattatttggaagcaagaaagttacgtggacaccactataccaggactcacccccagacacgtagattactgacatccgctatgcatgaagcagtccctaacgaccaacccccgaggttgtttctgttcagagccaacgatcgtgaaggactggggcgtgtgcgttctagtttagcccaacacctagaacagttgttgaaatcatggcctcaagactctagggacggtggcgcttatctgcataacttggcgtttacacttgcctctcgtaggtcccatctacaatggcagacgtatgccacagcgtctacgccatctgagttactgcaggcccttcaacaggagggaggagcttgggccgcccccgaaacgcgtgtggccgcctcagctccaaggctgggctttattttcactgggcaaggagcacagtgggctcgtatgggagtagagctaatggcctatccggtgttcagacaatcagtcgaagcgagtgacgagttcctaaggtccgcgttgggatgtccttggagtgcggtggacgagctagcgaaaccccaagcgaccagtcgtctttccgaagccgcgtattcccaaacgttatgtacggtgttgcaaatagcaaccgttgacttgcttgaagattggaacgtctgtcctgctagagttgcgggccactcatctggggaaattgccgccgcttactgtctaggcgcgctaactaaacatgatagccttagagttgcctactatcgtgggatcctttcttcagaaatgcaacagacacacggagatagaaggggagccatgatggctgtaggtgctagcccggaggaggttgaggcttggctggctaaacttacgaggggaagagtcgtagtagcgtgcataaactcacccacatccgtaaccgccagtggtgacgccgcgggaatagatgaactactagcgatggttcaggaagcaggtgttttcggccgtaagttacaagtcgacgtcgcataccattcccaccatatgcaaagtgttagttctgcctatgcagaattactgaaggaccttgctccgctacctgccagaccaggtaggacaatgcactctagcgtcttagggagagtaatcgatgccgctgaattgggagcatcaaactgggtacagaatcttgttagtcccgttagattttcagaagctgtgtcatccctattatctgacggagacaaaccggcagtagacgttttggtcgagatcggaccccacgcggcattaaagggccccgtacagcaaatattacaggcacaaggcgtgtctgctttgaagtacacatcagtcctttctaggggtcagagtgccgtgaaaacagccttggcatgcgcaggtgagttggtgctatctagcgtcccagtcgccatgagtagagttaacctagagagcggtccccaacccagtcccctggtcgatctgcccccctatccttggaaccgtagtacacgtttttgggccgaatccaggttaagcagggaatatagattgaggaagcacgctagattaccactacttgggtccccctgcccaacgatgggcgcaagagaaagatactggcgtgggatggtcaggttggaggaggagccttggattcgtgaccacgagattcaaggatccatcttataccccggagcagggtttctgattatggctatcgaagctgctagccaacacgcaggggaacagagaaaggtgagcgctttccgtttgcgtgacgttcacctagatgccgcgttagttgtgacggaggactcaacagcggaggccatcttgcagctgaggccccacctactggcacctgggtcatcacagtcttcatggatggagttcacagtcaattcatctatagatggcggagacttgagacaaaactgctcagggctaattatgatcgagtatgcggcagacgccgactccgctatggacagagagagagcgttggagagtgatatggtgtgcgactggtataaaaaaacttacgtctcttgtcagcagagcgtggatgtaggaaagttttattcacgtcttgcttctcttgggttggtttacggtcctactttcgccaacgttacagaaatacgtaggaccggacagggtcaatgtatcggggctgtcagaatccctgcggtagattctcttgtccccccagcatatagaagccaccctcacgtaatccacccgggaaccttagatgcagtgtttcacctagcattcgccgctttagaagactctcttttacccggaccaatggtccctacaacaatagacgagttagtcgtggcagcagacacccctaacactcccggaactctgcttaggggtgtatcccgttcctctccccacggatttagagaactgatcagtgacattgacatgttagacgaccaaaacagccgtgcgttggttcagattaagggctttagatgcgctgacgtctcaggcgggcgtatgaccgagtccgaggccgcgtctgccgagtcaaggcccatagggttccgtttagagtggaagccagccatagaccttctgaccggagaacagcttagaacctatctggatcattgcgtaaaacaggaaggcgcatccaacgttgctcgtgccacggaattgaataaccatgttcaccatcttgaagagacattgcctagggtggcagttgaccccgcaatggccaaccttagcgactggctgagtgcaaagagtgcgaagctgactaatggcgctgcatccagcagcaaaagaccctctccagggggggatatgctggccatgagggacgcgctaactgccgtcagagaggggagtattccgtcccccgaacaacaagataagatgctgagggaggttgagcaaaatggggcattaagtattctacttaagtcattagacgcgtatatcgatttgaggcatcatgccaaacccgacttgagcatactggagctgtcattagattccgtcccttacagtgttttcgcagcgctgccgtctagacataagatacttcaaacagcccagtatgcgattagggtcagtcaggagggtgtagcggacagggtccgtgcacaattcggatcccaggcgtcagacatagaggtaagcgcagcggattttaccaagaaactagacgaagcattaggtaagcacgatgttattcttatcttcgatcctgggtttattcacgccaagcttgaggtagttcttagaaatgcacgtaaactgttgaaccctggaggtcgtattattgttgcggaggtcggtgagccaggactatacctgggtacggcccttggttgtctgcaatggaccaggaacttggacgtagcccaaagtagcagctcttggacatcctgcttagcaaggtccggcctgacgcccgcgttgaagcttatcgatatggatacggagagtgccgtgcatggccatttcagactttcccttacgggtaacgctgctgagagtgcaaacagcgacaacagacaaccccagcaagtcacacttatagaatcagccaacgccagtgcgactgcccaggctattgctgctgcggtcgcacagaatctagagaaagcgtctattccgactaaacgtgtacgttgggggtctgacgtgagccaactaaaagggcaaccgtgtatagtcttgactgacttagagagtgctttgctgaaggatcccgcgccggaggacttagcggcgctgcaaagcctattttccaatgctgaaagtacactatgggtcagcggcccactaggaccagatgctgcgttaataaccggactatccaggtcagtttgcaacgaggcggcagacgtacacataaggactctagaagtcaccgatctgcctggaccaggggcggacagttatgccgacttagttaccagggtctttagatactctgggccggatacagagttcaggtggcattccgacgctctgttggtatcaagattggttgaggacgaggcaaggaacaaagagatcgcgcagctgttggggcagggagaaaaagctgcagtcgctacaaccctgcaggagaaaccagaaggattaaaattgtgcatgcgtcaaataggcatgttggactccgtctgtttcgaacctgacctattggctcttgagcccttagaagccggggaagtggaagtagacgtcaaggcgagcggagtaaactttagggacgttatggtggcactaggtcaaattcctgatagagctttcggatttgagggagcgggggtagtgcgtagagtgcacgcgagtgaaacgagattgcgtcccggtgacagagtagtgtttctggcccacggtgctcataggacggtacacagagttagggccgactacgcaatgccgatgcccgatactatgtcatttgaagaaggcgccgcgatactactggtgcacactaccgcgtggtatgcgttggtcaagtctgcaagagccacagcaggtcagtccgtccttgtacacgcggcggctgggggagttggtcaggccgtactgatgctagcgagacacctgggcttgcaggtctttgcgacagtaggttcagaggagaagaggaaattagtacacgaaacatacggcgttcctcacgatcacattttcaattcccgtgatgccagcttcgcgatgggcgtgaagagaatgaccaaagggaggggagtagacatcgttgttaattcattggctggtgaggccttacgtcaaacgtggcactgcttagcaccctttggcacttttgtcgaattgggaatgaaggacatacttgataatgcacgtcttgatatgaagccgtttctgcaggacgctacattcgtattttttaacctgaatagagttcagaaggaacgtcccgatcttatgggggaagctcttagggagactatggccttggtaagatctggggccttgaagcctgctacgccccttacgagttatccagcaagccaagtggaggccgcctttcgtaagattcagacagggcagcatttggggaagctggttcttactttccaagcaggggatgtcgttcccgttgtcagacctgatctgagtttaagcgacagcggtacttacctgttggtcgggggactagggggtttaggtaggagcttagccaggctacttgtacagttgggggcaagaaggctgtgtttttttagtaggtctggcgcggcgtcatctgaggctagagccctagttaaagaactggaaatgcaacacagggtgagggtattggtttgcaaaggggacgtgagcgatgcagacactgttagcagagtcgtccagcaatgtcgtgcagcgttagggcccatacgtggagtaatacagtgcgcgatggtgctgagagacggattattcgaacgtatggctcacgatcaatggacagaatccacgcgtcccaaagttcaaggtacatggaacctgcacgaacaaattccagtctccgatttttttattactttaagctctttcgcgggagtattcggtagcagagggcaatctaactacgctgccgcgggtgcttatgaggacgccatggctcaccatagacaatcacttggccaaagggctattactattgaccttggcattatgagggacgttggggtgttagcagaaaatgggattacggattatctaagagagtgggaggagccgtttgggatcagagagccggaattccacgcactaatcaaatcagccattatgtccacgacgcaacccctaacagaacgttctgtggtgcagatacccacaggcttggctacagcaagatccgcgcaagcagccggaatttctacgcccttttacttcgacgacgccaggttttcaatccttgcgcagactcgtactagcgcaggggctagtagtgccgcaggctctggggatgctgacgcaggcaaagttagtgttaggacccagctgtcccaggctcattccgtagcagaagcagcagccgccgttcagactgtactgctagaaagggtggcaagaacacttcaaagtagtgtagccgagattgacccgtcccgtcccttgcacagctacggcgtggactcacttgtagcagtggaaacagttaaatggatgtttaagaccctggatgcgaagctaaccgtgtttgatgttttatcaaatgtgtccataacggctctatgcgaaaaaatagcaagtatgtcaaccctggttaagttaaat

SEQ ID NO: 14 - DNA, 5151 bp, Artificial Sequence
  PKSC5B
atgtccagtaagttgcgtgttgcgaattttttactattcggtgatcagacagtggaaaaacttcctgctatacgtcatctagtgtcccacggcagtagtagtccgcttgtgcaaagattcttgcgtgaagtttgtgacgccgtgcaactacaggtatcaaaattgccacagcattctgagcaaagatcaaatataggcaactttgattccattttacgtctggctgagaataacgcccgtctggaggaaccgaatgagataattgccaccgttcttatgaacattgcgaggttgggcgaattgatactgtacgcagaacaggatccaactgttcttgcctcaaaggggaacaggaactgcattctaggattttgtacaggtgaagtagcagcagcggtcgctgccgtcgcccaggacactaacgagttggtagaacttggtgtggaggttactcatataatctttaggatggcaagggaattgaaccgtcgtagtttaatggtcgataggactaatgggccctgggctaggacgatccttggtatttcagtcgatagagtaagggagattttgcaagattttcatgaaaatcaaagtattcctcgtgcaaggcaagtttgtatcggttttgtttcagatggctggctgaccttattcggcccgccgaccacattacagcgtctactagagtggagcgctgagctagaggacgcgcctcaaatcgacacagacgcgcgtgggggcgtacatatggagaccttgcctgaggttgatccagatagaatcctaggatcttcaccatggttagatagagcgccggtacacactgcaaccataataagcccttacacatgtaaacctcgtcaacagaaaaccctaagagggctgttggaagagatcatagctgatgttgggcagagaactttaaatttagcaacgagcatgaatgcggctttagaactggcacaagcagacaagattcgtcttgtgatgcctgggtacaccagccacgacgtctacttccaaaagttgctacagaagagggggatcgagtatagcgtgatgtcacacggggatcatttatcatcaggaccatctcgtcaaggttccggtttagtggccgttgtgggcatgagtgggcgtttcccggggtctggggatattaacgcattttgggaagggttacttgagggtaagaggtatatacaagagatccccaatactcgtttcgacctagaacaatggtacgatgcaacaggtaagcagaaaaactcaactcttgcgaggacaggtgcctttttagacaaaccaggaatgtttgacaatagactgttcgatatgtctcctagggaagcaatgcagactgacgtccagcatcgtctgttaatgacaacctcttatgaggccttagaaatgtctggttattatcctgatggtacgttgagtaccaacaaagaccgtgtagcttctttcttcggtcagaccagtgacgactggagggaagtggtcgttcatcaaggtgtggatatctatttcgcaacaggctcttgcagggcattcggaccgggcaggttacaccaccactttaagtggggaggtcccagttattcagtcgacagtgcctgttcttccagcatcgctgcggttggactggcttgttcagcactattaggtagggaatgtgacatggccgtcgccggggggggctcactgttactgagtccttcacccttttccggacttagcaggggtgggtttctgagtgcacatgggggttgccagacattccacgacaatgcagatggatatgtaaggggcgaaggggttggggtggtggtattaaagaggttggaagacgcgcttgatgaccaagataacatattaggagtcgtaagaggttcaggaaggaactacagttcagatgctagttcaatgatgcaccccagcgcgaacgcacagaaaaagctgtactgcgatgtattggaacaaagtggagtagacgcaaactcaatctcatacgtagagatgcatggtacgggaactcaggcaggcgactttatggagatgtccagtgtgctaagcacttttgcggaaaaacgtggatcagacaacccactaatcgttggagctctaaaagcgaacataggtcacggggaagctgcagccggcgtctgcgcgctgatcaaaacccttatgatgttacaaagtagacagataccacctcaacccgacttgcctggtcccattaaccaccgtttcccggatcttgcggcaagaaatgtatatatcgcggcaagaaatatgcgtctggaagcctcaccagtggctaaagggactttacgtgtttttctaaatagctttgatgcctccggggggaactcatgtttattacttgaagaagctcctccgagagcggtgaaggacgcggatcctcgtggtcaccatgtagtaacactttcagcccgtagccaaaaatcactgattggcataaaggaaaggtatttagcacatttacgtcaacatcctggaacaaagctggccgatctggcgtactctacttctgcaagaaggatacatggactgctaagatatgccattgcagcgtcctctattgatgaggtcgttcaatgcctagaaactgacctggctcaggggaagacaccccgtcaacccccggctacacctacggttgtgttcacgttcaccggccagggcgcacactacgtgggtatgggtgctaatctttgggaaacctccgcgaccttcagaaatacactacatgattaccaaactatggcctccgcacaaggtctaccacagtttctacacctaataaccgacagcagtacacccgccccccaatcagggcctgatacagttcaggtccaactggctatggtaagtcttgagctggcgttagcgaagttatggcgtagctggggcatacagcctgcaatggttctaggtcacagcttgggtgaatacgcggcactttgtgtagctggtgtcttgagtgtgtcagacacattgtacctagtcgccaaaagggcgcagataatggcgggggcattgaccccgcacgaatatgggatgctagcagtcaacctttctgtcgccgatactagggaagttctgtcaagtggagagcatacgagttgtgcagtagcttgcattaatgcgcctaagatgacagttgtttctggtttgcgttcaaaattggatgacctacaggatcaactaaaatccgacgggacgagatgtacgcccttatctgttccatacggttttcacagtagccagttggacccaatcctgggccagttcgaggaagcctgtcagggggtaacgtttagtgcaccgaacgttcccgtggtatcaacattattggcaaccacggtcagggaagagggaacgttctcccccgagtatctagcgcgtcaagctagagaacctgttgattttgttggggcgttaggtgccgttcaagagcacaaactaccatcactaactttcttagagattggtccggatccagtgtgctctggtttggtgaacgccaccttaggagcagacgaggccgcatcaaggtgtgtcgcgtcaatgcacaggggtaaggctaattgggcgtctatcagctgttctctacgtgatctttacaccgcgggggcggctatagactggcctgcgcaccacagggatttcaaatcaagtgtttctctgctagatctaccaaagtactccttcgacgaaaaagaattctgggcaagcttccctgacagagacctgcaaactattggtgaggtgcagactaaacactcccagccacccgcaatcgtaccctctgtgcaaggctattgcacgacgacattacaaaggataactagggagacgattgagcctgacggccttagcgtgaccttctcttctgacctagctgaccagcatcttagggcggcggtaagggggcacgcagtagcggatgtagaaatctgctctagttctcttctattagacatggcgcttagtgcggcacagtatgcctacatgaagcattctcctggtcagaaaatgccagttccattaactgtaaggaattgctatttccataggggagttgttttgacggacaaagctcagacagtcgaagtaaccgtaacccttacctcaagtgcaaaaacagccgacatacgttatcattgtcgtacgccggatgaatactacgaagtcggtgcgtgccaagtggtactgaagccagcctccaagccggatcaagctggattccttgtaaggagtcgtatggcagcattaaaggcttcagccagtcatagattgggcaggagggcagtgtaccgtctgttcgacaatgttgtaaggtattctgaacaataccagggattagatagcgtacatttatccgaggatatgcaggacgcagtggcagagataaacatggcccacgttccggctgcagggggacactatctacaccatcctttcctattagacagcatagtccatctgagtggtttcctagttaacaacggacttaggtattcatccgaatgggcgtgtctaagcacgggcttcgatgaatggcacttattgaagcccttggaccctacgacagtatacacgtcctacaccttcatggaagattcaagatcaacgagtaacctggtcacaggagatgtttatgtctatgatggggaagaattagtaagcgtactgacgggattacagtttcaaaagatgaaaagaacggccttgacacatctgttgtctccgcccacagtcggatcaatggcagcgaaacccagtacctgtatgcctacgaaagcacaaactgaattattaccggcgcaggcgagagtagtcggttctcctgtgccgacacctccggctacggcgtccgtggatgacggcgagggtgagaaattcgacttggtgaacacattgttctccatcatagcaagagaggtcggagtcgaacccagcgatctagaaggtgatgtaaacctggcaaatttgggcatagattccctaatggccatcaccataatctcagttatgcaacaagagacgggtgttgaactaccggggacattttttctagataacgctacaactaccgccgtgattgcagcggtcggg

SEQ ID NO: 15 - protein, 1131 aa, Artificial Sequence
  PKSC5C
ATGTCATCAGCCGTAACAGTGTGGCAGGACGCACTAAACATTATTGCACAAGAAAGCGGACTGGAGCCCGCAGAAATAATTGAAACCGAAGATACTGCGTTTTTAACTCTTGGCATCAATCAAATTTTGGCGACTGCTATTTTGGCACATCTTCGTGGTCCAAGAGGCGAGCCGCTACCAAGAGACATATTCGATCAAAAGCCTACCGTGGGCGCCTTTAGGAGATTCTACGAGACACCAATACATCTGGATATAGCCCCGGTGGCAGCGCCTGCTCCACCCAAACTTAAGAGGGTCCCGAGTAGTTCAGTCCCGTTATCCATCGTGCTACAGAATAATCCCGCGAGCAGTAGGCATACGGTTTTCTTGCTGCCTGACGGCTCCGGTTCAGCGATGGCTTATGCAAACCTTCCCCCTGTCCATCCTGCTGTGTGCATAGTAGGAATGAATTCTCCATACCTTAGGGACGCAGGAAGCTATCGTTGCTCCGTAGAGGACCTGGCGTCTCAGTGGGTTAGAGAGGTATACAGGAGACAGCCAAGAGGTCCCTACATTGTAGGCGGATGGTCCGCAGGAGGCTATTACTCATACGAAGTCGCTAAAAGGCTACTGCAAGACGGTCACGCTGTAGCAAAACTAATCTTGATCGATAGTCCTTGCAGAACAGTTTTCGAGAGCCTAAGTATGGATGTTGTTAATTACCTATCAAGTAGGAACCTAATGGGGAATTGGGGTTCACCGGAGATGCCGGAATGGTTGGTCCAACATTTTCGTTCAACATTAGCAGCCGTGGGCAAATATAGGCCTCGTCCAATAGGTAGCGCAGGAAAGATGCAGACATACATCATCTGGTCAAGAGATGGCGTGCTAGACCACGATGCTTTGGCGAGAAGTGGATTGGATACTTCCGTTAAGGTCAGCAGATTTCTTTTGCAAGGTAAAGATGACCTTGGACCTAACGGGTGGGACGACCTGTTACCTTCTAAGGATATGGCAATAGCCACTCAGTCAGGCACCCACTTTACGATGATTAATAAGCCCCATGTAGCCCAAATGTCAGACTTGCTTAGAGACGCAGTAATCGGGATAGGCTCCGACCGTCAGAGCCACTGGCAACGTGTATCAGAATCT

SEQ ID NO: 16 - DNA, 7551 bp, Artificial Sequence
  PKSC6A
atgtcttcccaagctccagccccgagccgtgatgatatcgctgtggtggggctaagttgtagatttccgggggaagcggacacggcagaacacttttgggatttcatctgtaatggccgtaacgcctactcagaaaatccggaccgttggacgccagacgcgttccactacggcgagaaaaaaatcaatacatcacttccaaggggaggtcacttcatgaagcaggatgtagccgcgtttgacgcaaacttcttcaatctttcaaaggttgaagcagagtcaatggacccacaacaaagaattattatggaggttacttatgagtcaatggaatctgcgggattaagagttgaccagctggctggcagcagaactggagttttcatggcctcttttacaagtgattacagagaaatgttatatcgtgacgcagaaactgcccctttgtacacggcaacaggaacttccaatacgagtacctctaaccgtgtaagctggttctttgatcttcgtgggccaagtttcactgtaaatactgcttgcagctcctccctggtagcctgtcatcttgcatgtcaaagcttatggtctggagagacagaatccgctatagtagggggaacgtccctgcttctgaaccccgatatgtttttgtacttgtctaatcagcaatttctagccccagatggtcaatgtaagagtttcgatgagtcaggggatggatacgccaggggtgacggcatcggggtggtcatcctaaaaagagtggcggacgctattagagatggagatccgattcgtgctgttatcagggggtcagggtgcaatcaggatggtcacacgaagggatttacgattccgagtgtagaggcacaggctagtctgattgcagaaacctacaggaacgcggggttatcccttgccgagacgagatacgtagaagcacatgggactggcacccaagcaggagacacacgtgagatggagggcatcgcgaggacattttctcaacatagaactgcctcagatgagctacttgttgggtcagtcaaagcaaacattggccatttagaagcctgtgcgggtcttgcgagcttaattaaatgtgtctatatactggaaactggtgttatcccacccacgccgtctgtaagagtattgaatccgaagatccgttgggaggaatggcacttgaaggttcctgtaacgcagacgatttggccaactgagggtctaagacgtctatctactcaagggtttggttacggaggaacaaacgcccatttgatcctagatgacgcggctcattacttagaggctaggaagttaagaggccatcactacactagaacacatccacagactaggagactactaacatccgcgatgcatgaagctgtatccaacgaacaaccgccccgtctttttctttttcgtgctaatgacagagagggattggggagagtaaggagctcacttgcacagcatcttgaacaactactaaaatcatggccgcaggactcccgtgacgggggtgcgtatttgcacaacttagcgtttactcttgcgtctaggcgttctcatttgcaatggcagacgtatgccactgcatccacgccggaagaattgcttcaggtgttacaagctgagggcaacgcttgggcagcgccagaaacaagactagccgcatccccccctagacttggctttatatttacaggtcagggcgcccaatgggccaggatgggtgtcgagctgatggcctaccccgtgtttagacagtcagtcgaagagtctgacggcttccttagatctgcattgggttgtccctggtctgcggtagatgagcttgcgaagccccaggccacttctagactatcagaagccgcctacagccagacgttgtgcacggttttacaaatcgctacagttgatcttttggaagattggaacgtttgccctacccgtgtagccgggcactctagtggagagattgcagctgcttattgcttgggcgcccttacgaagcatgacagcctaagagtagcttattacaggggaatattgtcttccgaaatgcagcaaactcacggcgatcgtaagggggctatgatggctataggtgcatctccggaggaggtcgaagcatggttggcgaagttgaccagaggaagagttgtagttgcatgcatcaatagcccaacgtcagtaactgctagcggggatgctgcgggaatcgatgagttgcttgcaatggtgcaacaggcgggggtattcggtaggaaactacaggtcgatgtagcgtaccatagtcaccacatgcagagtgtatctagcgcttatagcgaacttctaaaagacctagcaccgctaccggctagacctggccgtacaatgcattcttcagttctgggtggggtaatcgacgcggcagagctgggcgcgagtaattgggtgcaaaacttagtcagtcccgtaaggttcagtgaagcggtttccagcttgcttagtgctggcgacaagccggccgtagatgtattggtagaaataggaccgcatgccgcactgaagggacctgtccaacagattctacaggctcaaggggtatcagcggttaaatatacaagcgtactgtcaagaggccagagtgctgtgaaaaccgccctagcttgcgccggggaactagtgctttcttccgttcctgttgctatgtccagagtcaattttgaatcaggtccgcaaccgagtccactggtggacctacccccctatccttggaatagaagtaccagattttgggctgagtcaaggcttagtagggagtataggttgcgtaagcacgccagacttccccttttaggcagtccctgcccgaccatgggggcaagggagagatactggcgtggaatggttaggttagaagaagaaccatggatacgtgaccacgagatccagggctctatactatatcccggggctggcttcttaatcatggcgatcgaggccgctagtcagcaagcaggtgaacaaaggaaagtcagcgcttttagactacgtgacgtgcatctagatgctgctttagtggtcacggaagatagtaccgccgaagccattttacagttgcgtccacacctgttagcccctggaagttctcaatcttcatggatggaattcaccgtaaacagtagcatagatgggggcgacttgagacagaattgtagcggattgattaaaatagagtacgctgcagacgcggattcccctatggaccgtgagagggccttggagagcgacatggtgtgcgactggtataaaaaaacttatgtgagctgccagcagagcgtggacgttggtaagttctattcaagattggcttctttaggccttgtgtatggacccacattcgcgaacgttaccgagattagaaggaccggtcaagggcagtgcataggagcggtgcgtatacctgccgttgattctcttgtccctccggcgtatagatcacatccacacgtgatacacccgggtacgctagacgcggttttccacctagcctttgcagccctggaagatagtctgcttccaggcccgatggtgccgacgacgatagacgaactagtcgttgctgcagacacaccaaatagcccgggcacgttactacgtggcgtctcccgttctagcccgcacggttttagagagctgatttcagatattgacatgctggatgaccaaagcagcagggcccttgttcaaatcaaaggatttagatgtgctgacgtctccggcggccgtatgaccagttctgaagccgcgtcagctgaatccaggccaattggctttaggttagaatggaaacctgcgatagaccttctgacgggcgagcagctacgtacctgtttagataggagggttaaacaggagggtgcctccaatgtcgcacacgcgactgaattgaacaaccacgtccatcaccttgaagagacactaccactggtcgtggtcgacccagcgatggcttctttcagtgactggcttagtgccaaaagcgccaagcttacgaatggcgtggctagcccttctaaaaggccctcccccggcggagatatgcttgcaatgcgtgacgcactgaccgccgtgagagccggcagtattccatctcctgagcagcaagaccgtatgttgcgtgaagttgaaaagaacggagcactatctattctattcaaaacgcttgatgcctatattgaccttcgtcaccatgccaaacccaatctaagcattcttgagctttctctggatagtgtgccctattctgtattcgccgctttgccgagccgtcataacatattacaaacagcacagtatgccatcagagtgtcacaggagggtgtggccgaccgtgtgaaagcccagtttggaagccaggcatcagacatagacgtatcagtcacagatttcacaaaaaaattagacgagggtttagggaaacatgatgttattctgatattcgaccccgggtttgtacatgctaaattggagattgtacttagaaacgcccgtaaattactaaacccggggggacgtatcatagtcgctgaggttagcgaacctggcctttatctggggactgcactgggctgtttgcagtggacgaggaacttagacgtagctcaaagcagcagttcttggacgagttgtcttgccagaagtggtctaacgccagcgctaaaattgatcgatatggatacagagagtgcggtccatggacattttagactgagcctgacgggtaatgccgccgaatccacgaatagcgatgacggccaaccacaacaggtcaccttaatagagagcgcaaacccatcagctacggcccagggcattgctgctgcagtcgcccaaaatttggaaaaagcgtcaattcccacgaaaagagttagatggggctcagatgtcagtcagctaaagggacagccttgtatagtcctaactgacctggaaagcgccttgttgaaagatccggcgcccgaagacctggcagcgcttcagagcctgttttcccatgcggagagtacactgtgggtgagtggtccgctaggtccagatgccgcattaatcacagggcttagcagatccgtttgtaatgaggcggccggtgtgcaaattcgtactttagaggtcacagatttgcctggccctggcgcagactcttatgccgatcttgtgacaagagtttttaggtacaggggtccggacaccgagttcagatggcattctgacgccttgcttgtatcccgtttggtcgaggatgaggcgcgtaataaagagatagcgcagttgttaggccagggtgaaaaggctgcggttgcaaccaccctgcaggagaagccagagggcctaaaattgtgtatgagacagataggaatgttggattcagtatgttttgagcctgacctactggccttagaaccccttgaagctggtgaggtcgaggtggatgtcaaagcttccggagtaaattttagggatgttatggtcgctctgggccagattcctgatcgtgcgttcgggttcgagggagcgggcgtagttaggagggtgcatgcgtctgaaactcgtttgcgtccaggggatcgtgtcgtttttctagctcatggtgcgcacaggacagtccatcgtgtcagggccgactatgccatgcctatgccggatactatgagtttcgaggagggggccgcgattttacttgttcacacgacagcctggtacgcccttgtcaaatccgccagagctaccgccggacaatcagttttggtgcacgcagcggcggggggagtgggtcaggctgtgctaatgttagctcgtcatctgggacttcaggtgtttgcaacggtaggaagcgaagaaaagaggaagcttgttcacgagacatatggagtgccacacgatcacatatttaattccagggacgcaagcttcgctatgggagtcaaaagaatgactaagggcagaggcgtagatattgtcgtgaacagtctggcgggcgaagctcttagacagacttggcactgtctagcacctttcggtacctttgtcgagttagggatgaaagacattttggacaacgctcgtttggacatgaagcctttcttacaggacgccacgttcgtgtttttcaatttaaacagagtacagaaagagaggccagatttaatgggcgaagcgttaagggaaactatggcactagtcaggtcaggggcattgaaaccagcaaccccactgaccagttaccctgcttcccaggtagaggctgcatttcgtaagatccagactggccaacaccttggcaaacttgtccttacgttccaagagggggacgtggtacctgttgtacgtccagacttgagcctgtcagattctggggtatatctgctggtaggcggtttagggggactgggtaggagtttggcacgtttgcttgtccaactaggcgctagacgtctatgcttcctgtctaggtcaggggcaacatcaagcgaagcgcgtgcactagtgaaggagcttgaattgcaacacagagtccgtgtattggtgtgcaagggtgatgtttcagatgctgatacggtctcaagggtcgttcagcagtgccgtgcggccctaggaccaatacgtggcgtgatccaatgtgcaatggtactaagagatgggctatttgaaaggatggctcatgaccaatggacggaaagtacacgtccaaaagttcaagggacgtggaacttgcatgaacagatcccagttagtgacttcttcatcaccctatcttcatttgcgggcgtattcgggtccagggggcagtctaactatgctgctgctggtgcctatgaagacgcaatggcccattatagagagagtctaggtcagcgtgcgatcactattgacttgggaatcatgagggatgttggagtacttgcagagaacggtataacggattacctacgtgaatgggaggagcccttcggcataagggaaccagaattccacgccctgataaagagcgctataatgagcacaacacagcccttgactgaaaggagcgtagttcagatccccacaggattggccaccgcgagatccgcacaagcagccggaatatccactcctttttattttgatgatgcgcgtttctctatacttgcacaaacgcgtacgtcaactggcgcctccagcgcggccgggccaggggatgcagacgccggtaaggttagtgtcagaacacaactatcacaggcccactccgttgcggaagcagcggctgcagtgcaaacggtcttactggaaagagttgcaagaacacttcagagttctgttgccgaaattgatccatcccgtcctctacacagctatggcgttgacagtttagttgcagtcgaaacggtcaaatggatgttcaagactctggatgcaaagatgaccgtctttgatgtgctgtctaatatgagcataactgccttatgtgagaaaattgcaagtatgagtactctggttaagcttaat

SEQ ID NO: 17 - DNA, 5151 bp, Artificial Sequence
  PKSC6B
atgtcaagcaaattgagagtagcaaatttcctgttattcggagaccagaccgtcgaaaaacttccggcaattagacatctagtttctcatggagcttcatcaccccttgtacagcgttttctgagggaggtatgtgacgccgtccaacttcaagtctctaagctacctctacattcagaacagaggtctaatattgggaattttgactctattctgaggcttgcagaaaataacgctaggttagaagagcctaatgaaatcatagcgacagtccttatgaacatcgcaaggctaggagaactaatactttatgccgaacaggaccctacagtgcttgcgagcaagggcaaccgtaattgtattctaggattctgcaccggagaggtggctgccgcggtcgcggcggtggcacaggacacgaatgaattggtcgaacttggggtagaagttacccacataatatttagaatggctagagaacttaatcgtaggagcttgatggttgatcgtactaacgggccatgggccagaacgattttgggcatctcagtagatcgtgtacgtgagatccttcaagacttccatgagaaccagagtattcctcgtgccaggcaagtgtgcattggcttcgtgtcagacggttggctgactctgtttggtccccctaccacattgcagagattgttggaatggagtgctgaactggaggatgcgccccaaatcgatacagacgcgaggggaggagtacatatggagacccttcccgaggttgatttagatcgtatcttaggatcatctgcttggttagatagggctcctgtacatacagcgaccataatatcaccgtacacctgtaagccaaggcaacagaagacgctaaggggcttgctggaggagatcatagccgatgttggccagagaacgctaaatttggccacgagcatgaacgcagccttagagttggcccaagcagataagctacgtttggtgatgccggggtacactagccacgatgtttattttttgaagttgctgcaaaaacgtggaatcgagtatagtgtgatgagccatggggaccacttatcaagcggcccgtctcgtcaagggtctggtttggtcgcggtcgttggcatgtccggaaggttccctggttctggggatattaatgctttctgggagggtttactggaaggaaaacgttatattcaggaaatccccaatacgaggtttgatcttgaacaatggtatgacgccacaggtaagcagaagaactcaactatggctaggacaggggcatttctggacaaaccggggatgtttgacaataggcttttcgacatgtctccgcgtgaagccatgcaaacggacgtccaacataggttactgatgacgacctcttacgaagccctggagatgtctgggtattacccagacggcacactatcaactaacaaagatagggttgctagcttttttgggcagacttctgacgactggcgtgaagtcgtagttcatcaaggagtggatatttactttgccacgggtagctgccgtgccttcggccccggaaggctgcatcatcatttcaaatggggagggccgagctatagcgttgattcagcctgtagcagctctatagcggctgtgggattagcttgttccgctcttttggggagagaatgtgatatggcgcttgcaggcggcgggtctttgctattatcaccgtcacccttttccggattaagcaggggcgggtttttatcagcgcatggggggtgccaaactttccatgataatgcggacggttatgtaagaggcgagggcgtaggggttgtagtcctgaagagacttgaggatgctttggatgaccaggataatatcttgggtgtcgttaggggtagtggaagaaactactcatctgacgcctcctctatgatgcatccgtccgctaactcccagaaaaagctatattgcgacgttctggagcagtcaggggtagatgcgaactcaatatcttatgttgagatgcacgggaccgggacccaggccggtgactttatggaaatgagttctgttttgtcaacttttgctgaaaaaagggggagtgataatccccttattgtgggcgcactgaaagctaacataggtcatggagaggcagcggctggggtgtgtgcactgattaagaccttaatgatgttgcagagccgtcaaataccaccacagcccgacctgccgggtcctatcaatcaccgttttccggaccttgcggcacgtaatgtatatatcgcggctagaaacatgcgtctagaagccagcccggttgcgaagggtacgctaagggtatttcttaactcctttgacgcatcaggtggaaactcatgtctgctgcttgaagaggctccacccagggcggtcaaggacgccgacccaaggtcccatcacctggttacactaagtgctcgttcccagaaaagcctggtaggaataaaagagcgttatttagctcatcttcgtcaacaccctggaaccaaactagcggatctagcatacaccacaagcgccaggaggattcatgggctactaagatatgccattgcggcatctagtatcgatgaagtcgttcagtgtctggaaacggatcttgctcagggcaaaaccccgaggcagcccccagccacgcccactgttgttttcacgttcacaggtcagggcgcacattacgtggggatgggcgccaatctttgggaaacaagtgcaaccttccgtaatactcttcacgattaccagaccatggcgtccgcacagggcttgcctcattttcttcatctgatcacggaaagttctactccgacgcctcagtctggccccgacacggtgcaggtacaattggctatggtgtctcttgagctggctttggccaaattgtggcgttcatggggaatccaacctgctatggttctaggacactctctgggagaatatgcagctttgtgcgtcgctggagttttgtctgtaagtgacacactgtaccttgtagccaagcgtgcacagatcatggcaggagcccttacgccgcacgagtatgggatgctggcagtgaatctgagcgttgcagatactagagaagtattatcctcaggccagcacacgtcatgtgctgtggcgtgcattaatgctcccaaaatgaccgttgtatcaggccttcacagtaaactagatgatttacaagatcagttaaagtcagacggaacgaggtgcactccgttatcagtaccgtatgggttccattcctcccagttggacccgattctgggccagttcgaggacgtatgccagggtgtaacattctccgcgcctaacgttcccgtcgtctctaccctactagccacgaccgtaagagaagagggaacattttctccggaatacttagcccgtcaggcgagggagccagtggactttgtaggtgcgttaggggcggttcaagaacacaagttcccgagtatgatgttcctagaaatcggccccgatcctgtgtgctcagggctggttaacgctacgcttggagctgacgaagcagccctgaggtgtgtagccagtatgcatcgtgggaaggccaactgggcctctatctcctgctcactaagggatttgtataccgctggagcagcgatcgactggcccgcccaccatcgtgactttaagtctagcgtttcattgttagacttgcctaaatattcctttgatgagaaagaattttgggcctccttcccagaccgtgacttgcaaaccataggggacgtcgaaacaaaaaatagtcaaccacctgctatcgtcccctcagtgcagggttactgtaccaccacattacaacgtattacaagggaaacaatagagcccgacggtctttccgttacttttagcagcgatttagctgaccaacacctacgtgctgctgttagaggtcatgcggtcgccgatgtcgagatttgcagttctagcttgttgttagacatggccctgagtgccgctcaatacgcttacatgaagcattctcctggccaaaaaatgccggttcctctgactgttcgtaattgctacttccataggggagtagttctaacagacaaagcgcagacagtagaagtgactgtaaccctaaccagtagtgctaaaacggccgacatcaggtaccactgccgtacacctgatgaatactacgaggttggcgcgtgtcaggtagtgctaaaaccagcaagtaaacctgatcaggcaggtttcctagtgaggtctaggatggcagcattgaaggcctccgcgagtcacagactgggcagaagggctgtgtataggctattcgacaatgtagtcaggtactccgagcaatatcagggcttagacaacgttcacctaagtgaagatatgcaggatgctgtggcagagatcaacatggcgcacgttcccgcggcggggggacactatttgcatcatccttttctattagactctattgtacatctgtctgggttcctagttaacaatgggttgcgttattctagcgaatgggcgtgtctgtcaaccggatttgacgaatggcacctactgaaacccctagatccgacgactgtatacacaagttacacatttatggaggattccaggtcaactagtaacttaattacaggcgacgtctacgtgtatgatggagaggaattggcatcagttttgaccggtcttcaatttcaaaagatgaagcgtacagccttgacccatcttttaagccctccaacagtcgggaacatggccgctaagccttccacgtgtatgccaaccatggctcaaacggaacttttacctgctcaggcccgtgtagcaggcagccctgtgccgacgccacctgctaccgcgtgtgttgacgatggtgaaggtgagaaattcgacttggtgaatacactgtttagcattatcgccagagaagtaggcgtcgaaccttcagatttagaaggcgacgtgaacttagcgaacttaggaatcgacagcttgatggccataacaatcatttccgtgatgcaacaggaaactggggtggagctgcccggcacattttttttggataacgccacaacgacggcagtaatcgcagccgtaggg

SEQ ID NO: 18 - DNA, 1140 bp, Artificial Sequence
  PKSC6C
atgagttcagcggtaaccgtttggcaagacgcactaaacatcatagctcaagaatcaggcttggagcccgccgaaatcattgaaaccgacgacaccgctttcgtgacattgggtattaaccagatcctagcaacggcaatcctagcccatcttagggggcccaggggtgagcctctaccgagggacatctttgaccagaaacccactgtcggggcattcaggcgtttttatgaaacgccgatccacttagatattgctcccgtcgcacccatcgcgacccctgctccgccgaaactaaagagagttccttcctcatcagtacctttgtcaatcgttttacagaacaaccccgcctccagcaggcacacagtctttttgctgcccgatggcagtggtagcgctatggcgtatgcgaatcttcccccagtccatccggccgtatgcatagtcggaatgaactccccctatctgagagatgcaggatcttataggtgcagcgtcgaagatttggcgagtcaatgggtcagagagatttaccgtaggcaacctagaggaccttacattgtaggagggtggagcgccggaggctactactcctacgaagttgcaaaaaggctacttcaggatggacacgccgtagctaagttaatcttgattgattcaccgtgccgtactgtgttcgagtcactttcaatggaggtagtaaattacttgagtagtaggaacttgatgggcaattggggcagcccggagatgccggaatggttagtccagcacttcaggtctaccctagctgctgtggggaagtacaggcccaggcctatcgacagcgccggaaagatgcaaacgtatatcatatggtccagagatggggttttggatcaagatgctctagctaaatccggcttggatacatctgtcaaggtcagcagattcttgttgcaaggaaaagatgacctaggacctaacggatgggatcagctattacctagtaaagaaatggcaatcgctacacaaagcggtactcattttacgatgattaataagccccatgtggcgcagatgtctgacctgcttcgtgacgcggtcattggtatcggatcagacaggcaaagccattggcaaagagtcagtgaaagt

SEQ ID NO: 19 - DNA, 4401 bp, Artificial Sequence
  PKSC7A
atgtcaagccgtgccccagcgccaaagaggcacgatgtcgccgtgataggtatctcctgccactttccttgtggtgcagatactgctgatcagttctgggactttatttgtaacggtaggactttgtattccgaggacattgatggcagtgccacgcatgctgttcatagttacgacaaagagatcaacatagacttgatccctggaggccataccacgaagaggcacgtggcgagtttggatgctagtttctgtaacctatctaacgcagaggctgagagcatggatttgcagcagaggattataatggaggcaacttatgaatccattgaaagtgctggccttgaagttggacagttagcaggcagtagaacgggtgtgttcattggaagtgttacatctgactacagacagatgcctcaccaccacgcagaaacggttccattgtataatcttactggagctagtaacacgccgacttctgatcatatttcctggttttttgacctgagaggaccttccgtaacgacgaatgcgacttatagcagctccttggttgcgtgccacttagcttgtcagagcttatggtccggagagtcagaaatcgcaattgttgggggaaccaacttacttctaaacccggacatgtttctatgttgtcataacagacaagcgctggcacctaaagataaaaggaaaagtcttgatgagtccagaggaggctattcaaggggcgacggagttggggttgtgatcttaaagagagtggccgacgcagtcagggatgctgatccgattagagcagttatcagggggtcaggctgcaacagagacgggcatacaaaagaatttacaacaccagacgtagaggcccagactagcctgatcgttgagacctatcactctgcgggactttctcttgccgagacaaggtacgtggaagctcacggcgctccgatatctttaggggatgctcccgagatggaggggatagcaagagccttctcacccagaagggttgcgtccgacaaattgcttgttgggagcatcaagtcttctgttggacatttagccacttgtgccggactggctagcttaataaaatccgtgtatatactagagaccggagtcatcccacctacacagtgcgcgtgcgatgtcaaacctaaggttcgttgcgaagagtggcaccttaaagtgccaacgacaaaagccccttggcctgcagagggcctaaggcgtataagcacgcatggtttcggttatggcgggaccaatgcccatttgattcttgacgacgcagcacactatctagaagcccgtaaccttagggggcaccactatacgcgtatacgtccccagccgcagagactatcaactagtgccgcatatagagaggagccaaaagttaaccctcccaggctgtttctttttcaagctagcaatagagaaggcctgggtagactacgtgcaagtttggcacagcatcttagtcaacgtcttaaaagctggcctgaagattctagggacagcgctgtccatttgcaaaaaattgcatttgcgctggcctcccgtcgttcacatataaactggagaacctatgccgtcgcatccacgctagaggagctacttaacgttctaaagcatggggagagggcttgggcgacgccggaggtgaggggtgccgccacgtcacttaggctgggcttcgtattcactgggcaaggtgcacactgggccaggatgggacttgatctgatggtatatcccgtattcaggcagtccgtcgaagagtcagatcgttttttaagagaagccttaggatgcagttggagcgctgtcgacgagttagcgaagccccagacggccagcagactggccgaggcagcgtacagccagactctgtgcactgttcttcagatagccgtagtagatcttctggaagactggaatatttctccgacccgtgtggtcggtcattctagtggggaaatcgcagcagcgtattgccttggtgcattgactaaacatgacggcctacgtgtcgcttactaccgtggcatccttagctctgagatgaggcaaagccagcaggaccagagaggtgccatgttggcgatcggtgcgtcacgtgggcgtgtcgaagagtggttagctcaacttaccagaggcaaggtggttgttgcctgtataaactctcccacaagcgtaaccgccagcggggacgaggaaggtaatgatgagctgctttccatggtccagagagccggggttttcggtcgtaagctacaggtgaacgtggcttatcattgtcaccacatggaatctcttagcacagcctacgcagaattgcttaaacagttagaacccttgcaggccaggaaaggtagagcaatgcattcaagcgtactaggcggagtaatcgaggctgcggagctaggtgctgcatactgggtgcgtaatctagtatccttagtcagattttcagaggctgtatcctctttaattagccatgaagataggcccgccgtcgacgtcttggtcgaaatcggaccccatcccgcgctgaaaggtcctgtccaagaaatccttcatgcacaaggagtgtctgcagtcaaatacatgtgcgtgattagtcgtggtcgtgggggaggcgtcaaaagcgcattaacgctggctggtgaattggtgttgtccaatgtgcccgtagaaatagggcacgtgaatttggatacggatttaccaccttccttactgatggatctaccaccctgtctatggaactgttctgcgcgtagcagagctaaaaatcgtttgagcaaggattatagattgcgtaggcacgctcaccttcccttgcttagaaactcccgtcttacgacctgcggatcagaaaggtgttggagaggcgttgtaactttgcaggactctccgtggatacgtgatcaccagatacaaggctctattctatacccttctactgtttttctgactatggcgatagaggccgcaagtaataaggcgaacgaaaaccgtaaaatgagcgctctgagggtgacgggcgttcacttcgacgacgccctgatggtgacggaggacagtactacagaggcaattttacgtctgagaacgctgccattgccggcagcgtcttcacaatctccatggatggagttcacggtaagtagcagcatagaggggggcgttcttagacaaaactgcgcagggctgatcatgatcgagtacgagatcgacgccgaccccttcgtagactctgggagaaccttggagtcagatatggttagggacggctacaagaagacagactcatcctgccgtcagtcagtggaactgggtaagctttatagcaggttggctcctctagggccagactacggcacaacctttgcgaacatgactgagatacgtaaaactggcgaaggtcagtgcattgggactgtacgtctggtaccacccgcccatgaatcacaccctcgtttaatacatcctggtactcttgatgctgtcttccaactagcattcgcagccttagaagatagtctgcttcttggacccatggtaccctccaaaattgacgaagtcgtaatcgccgccgaaattccgaactcattaggtgccttgcttcacggcgttccccaatcttcactgcacgaccctagggaactagtatcagacatagatatgttagacgatgagtctagccgtgtcgtcgtccaaattaaaggtctgcgttgggcagacgtcagcggcgggaggattacaccagcagcggctgccagttccgagactagacccataggatttagagtggagagaaagcctgctgctgaccttttagctggggagcaacttcagacatatgtagggaggctagctgagcaaggcgatgtgcccaatttagctagagctgctactcttaacaaccatgtgggcagactggccacctgccgttccgcacaagcagccggcatatccacacccttttacttcgatgaccccagatttagcatattggcccaacccagggacagcgacgtcgcatcaagtagcacctcagatgctggggatggcagtgccggcgaagtcagcgtcaggacgcagctttcccaggcgcagagcgtcgccgaggctgtagccgctattcaagcggcgttgttggaaagggtcgccagaacgctacaaatcgcactattggatatcgaccccagtaagccgttgcattcttatggggtcgactctttagtcgcggtagaaacagtaaaatggacaatcaagactttggacgcaaaactaactgtcttcgacctactatctaacgagcccgtcactgcattatgcgagaaaatcgctagtataagtaccctagtcaaactgactagc

SEQ ID NO: 20 - DNA, 5196 bp, Artificial Sequence
  PKSC7B
atgagttctgagttgggcgttacgaagatcttattgtttggggatcaaacagtagagaagctgcctgcgattagaaggctagtttctcatgcttcctcctccaggttggtacagagatttttaagagaagcgtgcgatgccgttcaacttgaagtgggaaagctacccgctcacagcgaagaacgtcgtaacatcgggaacttcgattcaatacttcgtcttgcagaggacaattcccgtttgaaggaacctagcgaaatcgtagctacggtgctgatgaacattgtcaggatcggggagcttctgctttacgctgagcaagacgtcaccgtattggcttctgaatccagcagaaactgcatcctgggcttttccaccggggaactagctgcagctgtcgccgctgttgcgcaagatactaacgaattagtcggacttggcgtagaagcgacacatattgtttttcgtatggcactagaactttttcatagatcagtcatggtagacagaaccaacgggccttgggccaggacagtgcttggtatttctgccgacagagttagaaaaatattggtcgagttccacgagagccattctattccgcgtgtgcgtagagcctgtgtgggatttttgagtgacagttggctaactgtatttggtccacccactacattgcaacaactgttcgaatggtcagcagagcttgaagatgctcctcatatcgaaacggatgcatgtatgggtgtacatatggaaacgctgccggaacttgatcttgggaggatactgggtagcagcgcatggctgaatagagcgccaggaagaacgaccactattgtgtcaccatatacgtgccaacctaggcgtcaacaaacgctaaggggcctattagaggaaatattgatggatgtaggtcagagaaccctgcatcttgcagcagcgacggatgcaattctagatctagcgcgtaccgacaaactacgtgtagtcatgccgggttacacctctcacgacgtacacttactgaaaagtcttcagaggaggggcattgaatattcagtaatgtctcatggcgaccatttggcaagcaaacctgccagggagggtagtggaagggtagccattgtaggcatgagcggcaggttcccgggatcttcagacgtcgacaccttctgggagggccttctgcaagggaaacgtcacgtacaagaaatccccagtaccaggtttgacctggagcaatggtatgatgcaacaggtaaacaaaaaaacagcactatggcgcgtacaggagccttcctggatcgtcccgggatgttcgacaatcgtttgtttcacatgtccccaagggaagccatgcaaacggatgtccagcatcgtcttctgatgacaactagctatgaggctctagaaatggccgggtatttccctgacggaacgccctcaaccaatcgtgacagagtgggtagctattttggccagacgacggacgattggagagagcttgccttccaacagggggaggacatttacttcactacaggttccaatagagcatttgggcctgggagattacaacaccactttcaatggggtgggccttcttacagtgtggatagcgcctgtagctctagcgtggcggcagtgggacttgcatgcagtgcactactgggaagggagtgtgatatggcacttgcgggcgggggttcacttttactttcccccagttggttctcaggactatcaagaggcggcttcttgtctactcacggtggatgccagacgttccatgacgatgctgatggttatgtaaggggagagggagttggcgttgtggttttgaaacgtttggaagacgcccttgacgaccaggataatatcttgggcgttattcgtggctcaggtaggaattattcttcagatgcctcttcaataatgcatccttccgttaaagcacagcagcaactatatcgtgatgtcctggagagtagtggagtcgatgcgaacagtataagttatgtcgaaatgcatggaactggtacgcaagccggcgacttcacggagatgtcctcagtcttgagtgtcttcgctgaaaagagaggccctgacaaccctcttgttgtaggtgcagttaaggcctcaataggccacggtgaggcagccgccggggtctgtgctctaataaagaccctgatgatgctgcaatcccgtcgtattccaccccaaccggagctacccgggcccgtcaaccaccgttttcccaacttgggcgctagaaatgttcacatagccgcacgtaatatgcgtctggaggcttctccggtagcagagggtacgctgagggtgtttttgaactctttcgatgcatcagggggaaacagttgcctgcttttggaagaggcaccacccagggcggtgaaggatgcggatcctaggtgtcatcacgtcgtaacactgtctgctagatcacagaaatcacttattggtatcaaggagcgttatctagcatatcttagacgtaatcctggtattaagttagctgatctggtatatactacaaatgcaagacgtacgcatggcccacttaggtatgccgtggcggcgagcagtgttgacgaagtgatgcagggggttgaggccgatctaacaaggggaggaactcctgggcatgtaggtgaaaccccggcagtggtttttatcttcactggtcaaggatcacagtattcaggcatgggctctcacttatggaaaacgtgggctgcctttagaaacaaactgcacgactatcagacgatggcgagcgctcaaggattgccgcatttcctggatttaattacggaaaactctgcttctagccaacaacctggttctgacgctgtaaaggttcaacttgccatactttgtctagaactagctctggccgagctttggaggagttggggggttaggccagcaacggtccttggccatagccttggtgaatatgcagcgctatgcgtagctggggtgctgaccgtgagcgacgcaatatacgtagttgcgaagagggcccaaattatggctgaagccctaacaccgcataagtatggaatgcttgcgatgaacctgtcagtagatgacgcgagggaagttttatccagtggtaagcacgtaagttgtgcggtcgcttgtataaacgcgcccaggatgactgtagtttccgggccacgtttagagctagaggagctacagaaccaactgaaatctgacggaaccagatgtacttaccttcctgtgccatatgggtttcattcttcccaactggacccaatcctagcgcaattcgaggcggcttgccaaggcgtgaacttcagcacacctcacctacctattgtctccagcttgcttgccacaagcgttagaggtgatggtactttcagcccgggatatctagccaggcaggcccgtgaaccggttgactttgttggagcacttgcagctgtgcaagaacaaaggtttccgagccccgtctttttagaaataggacccgatccggtatgcagtggattagttaacgcatccctgggtgccgatggaacgaaggtgcgttgtctggcgtccatgcaccgtgaaaaggacaattgggcctccatttcctcttccttacgtgacgtttacgtcgccggggtggcgattgattggccagcgtaccacagagagtttaagagctcagtttcattgttggacttacccaaatactcatttgaagaaaaagaattttgggcgccatttccgggtcgtagcagcagagctattggtgaggctgaggccgatcaggggcagccacatgtagtcaagcccagtgtccagggctattttactactactctgcagagagtggtcaaagaaaccgttcaatctgacggttgcagcgtaacatttacatccgacctaacggatcaggatctaagaacagcggtaagaggccacgtggtagctggcgccgagatctgttccagcagtatccttctggacatggcgttatccgccgcacaatatgtttatgctaagcaaacttcagggcaatcattaccctttccccttaccgtgaggaattgttgcttccacagggccgtcgtcttcgcagaaaaagcagcccagactgtcgaagtgagcgtcaatctggcctcctcatcaaagacagctgacgtacagtatagatgtaggacctccggggagagctatgaggtaggaacgtgtcaggtcgtcccagggcccgctgggaaaccagcacaagcagggttccttgcccgttctaggatggccgcccttaaggcttcagcaagtcatcgtttgggaagaagagctgtgtataggttatttgataatatagttagatattccgaggagtacaagggtctagacaacgtacacttgagcgaagacatgcaggatgcaatggcagagatcaacatggctcaggcaagtgccgcaggagggcactacctacaccatccattcctgttggattcaatcgttcacctgtccggatttttactgaataatggcttgagatactccgatgaatgggcatgtctatgtacaggctttgaagaatggcatctgttaaagcctctggaccccgcgaacgtctatactggatatacatttatggaggagagttccagtacgcgtaacctagtgactggagatgtgtatgtctaccatggggacgacttagtaagcgtattagcgggattacagttccagaaaatgaagcgtactgcgttaacacatctattaagacctcctaccgtaagaaacgcggctaacgaagcgtccagctacgtgcctgctgcaccccagacgaaagctaaggcttggccagcccaacccatagctacgatacaccaagtgaataatgtagcggggcctgaggtaccagcgcctccaacgcctgcgagcatgaatggtggaggccaacccggcctagtggacgcgcttttcgcaattgtagcccgtgaagtgggcgtggagagatctgatctaaacggagatatgagcttggaagatctaggcgttgactccttgatggctgtagctattatatccgcagtccaacaagagactggggtcgaattacccgctgctttctttctagacaaccccacaacgaccgctgtaacggaggcggctgggagactgtctgcctgttgt

SEQ ID NO: 21 - DNA, 1131 bp, Artificial Sequence
  PKSC7C
atgagctcatcagttacattgtggcaagacgccttagaaataatagcgcaagaatcaggccttgaacccgcagagattctggaaactgatgatatggaatttgctagacttggcgtcgatagcattcttgcgacagcaatactatcccatctgcgtggacctaggggagaggcattaccgcaagacatttttaatcaaaaaccgacagttggtgcattgagacgtttttacgagactagtatccatctgaccatagcccctacccttacccccgcacctaccaccaaattggaccgtaaagctaccccagtccctttaagtattcttttgcagaatgatccggtgtctagccgtcataccgtattcttgcttcccgacggttccggctccgcaatggcgtacgccaatttgaccttaattcacccagaggtatgcgtcgttggcatgaactcaccttatttgagggaagcaggctcctacagatgtagtgtcgaggacttagcagctaagtgggtcctagaaatataccgtaggcagcctcaaggcccgtactcagttgggggctggtctgctggcgggtactatagttatgaggtggcaaagcgtttattgcaggacgggcacgccgtggaccgtctgattttaatagatagcccgtcccgtaacatctttgagcctttaagcatggaggttgttaactatctatcctcacgtaatttaatggggaattggggttcaagggaggtccctcaatggcttgtcgaacattttagatttacccttgcggcggtaggcaactatagtccgaggcctatagacagtgctggtggcatggagacatacataatatggtccagggatggagtgttggaccaagatgagcttgcaaaatgtgggctagatctgagcgtaaaagtaagccgttttgtccttcagggtaaagacaatttaggtccaaacggatgggaggagttggtcccttcaaaaaagatcgctataggcactcagagtgggacccacctgacaatgatgaacgacccgcatatgagtcaaatgtcacacttgcttagagatgccgtggtcggcatcactcccggacgtcagagccattggcaaagggtcattaaggct

SEQ ID NO: 22 - DNA, 7530 bp, Artificial Sequence
  PKSC8A
atgtccagtcaggcaccagctccttctagggatgacatagccgtcgttggattgtcttgtcgttttccaggcgaagcagacactgctgaacatttttgggacttcatctgcaacggtaggaacgcgtattctgagaatcctgatcgttggactcccgacgcgtttcactacggggaaaagaaaatcaatacgtcattgccacgtgggggacacttcatgaagcaagacgtggctgcgtttgatgccaatttttttaacttatccaaggttgaagcggagtcaatggacccgcaacagcgtattataatggaagtaacatacgagagtatggagtccgcgggtcttcgtgtagatcagcttgccggcagcaggactggcgttttcatggcctctttcacttctgactacagagagatgctttacagggacgccgagacggcgcctctatatactgcgacaggtacgtccaacacgtcaacgtcaaatagggtgtcttggtttttcgatttaagggggccctcattcacagtgaatactgcttgcagttcatctctagtcgcatgtcatttagcgtgtcaatccttatggtctggggagaccgagtctgctattgttggaggtacttcacttcttctaaacccagatatgttcttatatctttccaatcagcaattcctggcaccagacggtcaatgcaagtccttcgacgagtctggtgatggttatgcgaggggcgatggcattggagtagttatcctaaagcgtgtcgcagatgccgttcgtgatggtgatcctatcagagcagtcataagaggctcaggttgcaatcaagatggacatacaaaaggctttactataccaagtgtagaagcacaggcatctctaatcactgagacgtacagaaatgcggggctatccctagcagaaacgcgttatgtagaagcgcacggcacgggtacgcaggcaggggatactagggaaatggagggcatcgcgagaacgtttagccaacacaggaccgctagtgatgagctattagtgggttcagtaaaagcaaatattgggcaccttgaggcgtgcgcaggactggccagtctgatcaagtgtgtgtatatcttagagacgggggtgattcccccgaccccgagcgtgagagtactaaatccgaagattcgttgggaggaatggcacctgaaggtacctgttactcaaacaatatggcccacagaaggccttcgtcgtttatccacacagggatttggatacgggggaaccaacgctcacctaattttggacgatgctgcacattacctagaggcccgtaacctgaaggggcaccactacacacgtacacatccccagccacgtagactgctaacctccgcaatgcatgaagccgtaagcgacgagcagccgccacgtttattcctttttagggctaacgatagggaggggctgggaagagtgaggtcaagcttggctcagcatctagagcagttgttgaagtcatggccgcaggacagcagggacggtggtgcatatctacataacctagcatatacattagcgtctaggcgtagtcatctgcagtggcaaacatatgctactgcgagcacgccagaagagcttttacaagttctacagcatgagggcggtgcatgggcggcgccggaaacgagacttgccgcgagtcccccacgtctgggatttatatttaccggtcagggggcccagtgggccagaatgggcgttgaactgatggcctaccctgttttccgtcagtccgtagaggctagtgatgaattcttacgtactgccttaggttgcccgtggtcagccgtcgacgagctggcgaaaccgcaagcaacaagcaggctgtctgaggcggcatattcccagacattatgcacggtggttcagatagcgaccgtagatcttctggaggattggaacgtgtgcccgacgcgtgtcgcaggccattcctccggtgagatcgcggcagcatattgtcttggtgcccttacaaagcacgacagtctacgtgtagcgtactacagggggattttatcctcagaaatgcagcaaactcacggggacaggaaaggcgcaatgatggccattggggcctccccagaggaggttgaaagctggttggctaaactgactcgtggccgtgtcgtggtagcatgtatcaacagccctacttcagttactgcgagcggtgacgccgcgggaatagacgaacttttagccatggtgcagcaagctggcgtgtttggcaggaagcttcaagtcgatgtggcataccacagccaccatatgcaatctgtaagctcagcttacagcgagctgcttaaggatttagcgccacttcctgcgagacctggcagaacaatgcatagctctgtcctgggcggggttatagacgcagccgagctaggggcgagtaactgggtacagaatctagtaagtccagtaaggttcagcgaagcggtctcctcactactttccgcgggagacaaacctgccgtcgacgtgctggttgaaataggtccccacgccgcgttaaagggcccggtgcaacaaatcttacaggctcaaggtgtctctgcagtgaaatacacaagcgtgttgtcaagagggcaatccgcagtcaaaaccgccttagcttgtgcgggtgaattagtcctttccagcgtccccgtagccatgtcaagagttaactttgagtcaggacctcagccaacgcccctagtggatctacccccgtatccgtggaaccgttccactagattctgggcggagactcgtttgtctagagaatacaggttacgtaagcatgcaagattacccttgctaggcagcccatgccctacaatgggcgcaagagaacgttactggaggggtatggtcaggttagacgaagagccatggataagagaccatgagattcaaggtagcatactgtatcctggtgccggattccttataatggccattgaggcggcttcacaacaagcgggcgagcaacgtaaagtttccgcgtttcgtttgcgtgacgtgcatcttgacgccgctctggttgtcacagaggacagcacagctgaagctattttgcaattaagaccgcatctattggctcctggatccagtcagtccagctggatggaatttaccgtgaatagttccatagatggtggagacttacgtcagaactgctcaggcctaataatgattgaatatgccgccgacgccgattcagcgatggaccgtgagagggcattggaaagcgatatggtctgcgattggtacaaaaaaacctatgtcagttgccagcaatcagtggacgttggcaagttctactcccgtctagcgtctctgggcttagtttacggtccaacgttcgcgaacgtgacagaaatcagaaggactgggcagggccaatgtattggagcagtaagaatacctgcagtcgactcattggttccgcctgcttaccgttcccacccacatgtcattcatccagggacgctagacgcggtattccatttggcctttgccgctttggaagattctctgctgccaggcccaatggttcctactactatcgatgaactggtggttgcggcggatacgccgaatagtcccgggacccttcttcgtggcgtttcacgttcttcccctcatggattcagggaattgatatcagacatcgatatgttagatgatcaaagctccagagcgttggtacagataaagggatttaggtgcgcagacgtgtccggcgggaggatgacgtcaagcgaagcagccagcgccgagtccaggcccatctcatttagacttgaatggaagccagctattgacttgctaaccggagaacaacttaggacccatttggatagaagggtgaaacaggagggggcgagcaacgttgctagggccacggagttaaacaatcacgttcatcatctggaagagacactaccccgtgtggccgttgatccggctatggccaacttatcagattggttgtcagcaaagtccgccaaactaaccaatggagcggcttcaagctctaaaaggccttctccaggttccgacatgccggccatgcgtgatgccctaacggctgttagggccggcagtatcccctccccagaacagcaagaccgtatgctaagagaggttgaacagaatggggccctaagtatcctgttcaaaacattggatgcttatattgatctacgtcatcacgccaagccgaatttatcaatccttgaattgagcctagactccgtgccctactctgtgtttgcggcccttccaagtcgtcacaagattctgcagactgcccagtatgctatcagggtttcccaagaaggagtcgccgacagggtaaaagcccagtttggctcacaggcgtcagacgtcgatatctctgtagctgatttcacgaaaaaactggacgaagggctaggtaagcatgatgtaattctaatcttcgaccctggatttgtccacgctaagctggaagtggtgctgaggaatgcgcgtaagttattaaatccgggtggaagaattatcgtagcggaagtcggggagcctggtctgtatctaggaactgctctggggtgtttgcagtggacaagaaatcttgatgttgcccaaagttcatggacttcatgtctagctaggagcggtctgacccctgcactgaaactaatggatgtcgatacggaatccgcggtccacggacacttcaggttatctttaaccggtaatgcggctgaaagcactaattctgacgacggtcagccccaacaggttactctgatcgaatccgccaatgccagcgccacggcgcaaggcatagctgcggccgtggcccaaaacctagagaaagcaagtattcctacgaagagagttaggtggggttccgatgtgagtcaattaaagggtcaaccctgcattgttctgacggacctagaaagcgcattactgaaggatccggctccagaggaccttgccgcgctacaatcccttttctcacatgcggaatcaaccctgtgggtatctggcccattgggcccggacgcggcgcttattaccgggttatctaggtccgtctgcaacgaggcggcaggtgtgcaaattagaactctggaagttaccgatctgcccgggcccggtgcggatagttacgcggatttagtcaccagggtattcagataccgtggtcctgatacggaatttcgttggcacagtgatgctctgcttgtctcccgtctggtcgaagacgaggtcaggaacaaggagatagcccaattgttgggtcagggtgagaaagcggccgtggctacgacgcttcaagaaaagcccgaaggtctgaaactttgcatgaggcagatcggtatgttagatagtgtatgctttgagccggagcccttggaggcaggagaagtggaggtagatgtcaaagcatctggcgtcaattttagagacgtaatggtagccttgggccagattcctgatagagcattcgggttcgagggtgccggagtggtcaggagagtacacgcaagcgaaactagactacgtcccggggatcgtgtagtttttcttgcacacggagcccacagaacagtccatcgtgttagggctgattacgctatgccgatgccggacacaatgtcatttgaagagggcgcggcgattctgctagtacataccacagcctggtacgcgctagtaaaaagcgctcgtgctactgcgggacagtctgtcttggtgcacgctgctgcaggaggcgtcggccaagcagtgctaatgttggcgcgtcacttaggtttgcaggtctttgcaaccgtaggctctgaagagaagagaaagctagtacatgagacatatggtgttccacacgaccatatatttaattctagggacgcgtcattcgcaatgggcgtgaagcgtatgacaaaagggaggggggtggacatagtagttaattctctggcgggcgaggccttgagacaaacatggcactgcctggccccctttggtacattcgtagagctggggatgaaagatattctagacaacgccaggttagacatgaagcccttcttgcaggacgctacgtttgtattcttcaatttaaatagagttcaaaaggaaagaccagacctaatgggggaggcgctgagagaaaccatggcacttgtaaggtcaggtgctctaaaacctgctactcctttgacttcttatcctgcttcccaagttgaggccgcattccgtaagattcagactggacaacatctgggcaagctggtattaaccttccaagagggggatgttgtacccgtggtgcgtccagatctgtctctgagcgatagcggtacatatttattggtagggggtttaggcggattagggcgtagtttagctcgtcttctggtccaattaggcgctaggagactgtgcttccttagccgtagcggtgcaacgagcagtgaagccagagcactggtcaaggaattggagctacaacatagagttagggtactggtatgtaagggagacgtaagtgacgcagaaacggtatcaagggttgttcagcaatgtagagcagctctaggaccaattagaggcgtaatccagtgtgccatggttcttagagacgggctattcgaaagaatggctcatgatcaatggacggagtctactcgtcccaaggtacaaggtacctggaatttgcacgagcagattccggtctccgatttctttatcacattgagctcatttgccggggtgttcggctctaggggtcagagcaactacgccgccgctggggcctatgaggacgcaatggcccaccatcgtgagagtttgggacaacgtgcaattacaatagacttaggaataatgagggatgtgggcgtactagctgaaaacggcattacagactacctaagggaatgggaggaaccgtttggaatacgtgaacctgaattccatgcacttattaaatctgcgataatgagtacaacgcagccacttacagaacgttcagttgttcaaatccccactggactagcgaccgcgagatctgcgcaagccgctggcatttcaacgcccttctatttcgatgatgcacgtttcagcatacttgctcaaacaagaaccagcactggtgccagctctgcagcaggaccaggtgacgccgacgcaggaaaggtctccgttcgtacacagttgagtcaagcccattcagttgccgaggccgcagccgcggttcaaaccgtactgctagagagagttgctagaactctgcaatccagtgttgcggagatcgatccaagcaggcctctgcattcatacggtgttgattcacttgtcgcagtggagacagtcaaatggatgttcaaaaccctagatgccaagatgaccgtattcgatgtgttatctaatgtgtcaataaccgcgctgtgcgagaaaatcgctagcatgtccaccttagtgaaactaaca

SEQ ID NO: 23 - DNA, 5235 bp, Artificial Sequence
  PKSC8B
atgagcagtaagcttcgtgtagcgaattttctgttgtttggggatcagaccgtcgagaaacttccagcgataaggcacctggtgagccatgggagttctagccccttagtacaaagattcctaagagaggtctgtgacgcggtgcagcttcaagtatcaaagttgcccctgcactcagaacaacgtagcaatataggaaattttgatagcattctacgtctggcggagaataatgcacagctagacgaaccaaacgaaataattgcgacggtcttgatgaatatcgcgagacttggggagcttatcctttacgccgagcaggatccaacagttctagctagtaagggtaatcgtaattgtatcttgggattttgcacgggcgaggttgctgccgccgtagcagcggtggctcaggacactaacgagctggtcgagctgggggttgaggtaacccatatcatattcaggatggctagagagttgaacagacgtagcctaatggtagaccgtacgaatggtccgtgggcgagaactatccttgggataccagtagacagagttagagagatactacaggacttccatgagaaccaatccattccgagagcacgtcaggtttgtatcggctttgtctctgatggatggcttacgctttttggccctcccactacattgcagcgtctacttgaatggtctgccgagcttgaggatgctccacagattgataccgacgctaggggcggagttcatatggaaacgctgcccgaagttgaccttgacagaatattgggaagttctgcctggcttgatagggcccccgtacatacagctaccattatctccccttatacatgtaaacctcgtcaacaaaagactctaaggggactactggaagagattatcgcggacgttggccaaaggactttaaatttggcaacgagcatgaacgcagcgttggagcttgcgcaggctgataaattgagattagtgatgccggggtatacttcccacgatgtatatttcttaaagcttttacaaaaaaggggaatagaatattctgttatgtctcatggagaccatttgtcaagcggaccatcaaggcaggggagtggtctggttgcggtggtaggtatgagcgggagattcccggggagtggtgacatcaacgctttttgggagggactgctagaaggtaagcgttatatccaggagataccaaacactaggttcgacttggagcagtggtacgatgcgaccgggaagcaaaagaactcaaccatggcgagaactggtgcttttctggacaaaccgggaatgttcgataacaggttgtttgatatgagtccaagggaagcaatgcagacagacgtgcagcatcgtctgttgatgactaccagttacgaggctctggagatgtccgggtattatccggacggcacactgagtacgaacaaagacagggtagcctcttttttcggtcagacgtctgatgattggagggaagttgtagttcaccaaggggtagatatttactttgcaacggggtcttgtagggctttcggtccaggtagactacaccaccactttaaatggggcggaccgagctactcagtagacagcgcgtgctcttcatccatagcagctgtgggcctggcgtgtagtgcattgttgggaagggagtgtgacatggctcttgctgggggagggtctctgctactatctccgtccccattctccggtttaagtcgtggcggattcttgagtgcccacggcgggtgtcaaaccttccatgataacgcagacggttatgtgcgtggagaaggtgtgggggttgttgtgttaaaaaggctggaggacgctctggatgaccaagatactatattaggagtggttcgtggatctggcaggaactatagttctgatgcgagtagtatgatgcacccgagtgcaaatgcccaagaaaagctatattgtgatgtactggaacagtctggggttgacgcgaactctatcagctatgtagagatgcatggtacagggacacaggccggtgactttatggagatgtcatctgtactttctacatttgcagagaagaggggctctgataaccctttgatagtgggcgccttgaaagccaacataggtcacggcgaagcagccgctggtgtatgcgcattgattaaaacccttatgatgcttcaatcaaggcagatccccccacagccagatttaccagggccaataaatcaccgtttccctgacctagcggcccgtaatgtttatatcgcggcgagaaacatgaggttagaggccagccccgtcgctaagggtacactgagggttttcttgaatagctttgacgcgagtggaggtaattcctgcctgctgttggaagaggctccgcccagagccgttaaggacgctgacccccgttcacaccacgtggtaaccctgtctgctagatctcagaagtccctagtcgggataaaagagagatatcttgcccatttaaggcaacacccaggcacgaaactagcggatcttgcctatactacatctgccagacgtattcatggtctacttagatacgccatcgccgcgtcttcaatagatgaggtagttcaatgtttggaaacagacttggcccaaggaaagacaccgcgtcagccccctgcgacccccacagttgtttttacattcactggtcagggtgcccattacgttggcatgggcgccaacctatgggaaacctcagccacattcagaaacaccttacacgattatcagacgatggcgagcgcccaaggtctgcctcacttcctgcacttgatcacggacagctctactcctgcaccgcagtctggtccagacactgtgcaagtgcaattagccatggtgagtttagagttagctttagcaaagctttggcgtagttggggcatacaaccagcaatggtattggggcactccctaggggagtacgcggcactatgtgtagctggggtattgagcgtttctgatacgctatatttggtggcaaaaagggcccaaatcatggccggcgcgctgaccccccatgagtacgggatgttagccgttaatctgggggttgctgataccagagaagtattatcaagtggacagcacacatcttgcgctgtggcatgcatcaacgctccaaaaatgacggttgtttccgggccgagaagtaaattggacgacctacaaaatcagttgaaacttgatgggaccagatgcacaccattgtctgttccctatggttttcactcctcacaactggaccctatattggaccaattcgaggcagcgtgccaaggagttacattctccgctccaaatgttcccgtggtgagtacgctgcttgcaaccacggttagagaagaaggtacgttcagtccagagtaccttgctaggcaggctagagagcccgtcgattttgtgggcgctcttggcgcagttcaagaacataagtttccttctgttatctttctggagataggtcctgatccggtatgttctgggctggtgaacgctacactgggaaccgacgaggctgcacttagatgcgtagcgtctatgcacagaggtaaggccaactgggcttccatatcatgctcattaagagatctatatacggcgggcgcggcaattgactggcctgcgcatcaccgtgatttcaaatccagtgtgtctttattggatctgccgaaatactccttcgatgaaaaggaattttgggcttccttccccgacagagacatacagactatcggcgatgtcgaaacgaggaattcacaaccccctgccatcgtccctagcgtgcaaggctattgtacgacaacacttcagagaatcacgagggagacaatcgaacccgacggtctgtctgtaaccttcagttcagacctggcggatcagcatttgagggcagcggtccgtgggcacgcagttgcagatgtcgagatttgcagcagcagtctgcttctggatatggccctatctgctgcccagtacgcgtatatgaaacattctccggggcagaagatgcctgttcctttaaccgtgagaaattgctacttccacaggggtgtcgtattaacggacaaggcacagactgtagaggtaaccgttaccttgactagtagcgcaaaaactgccgatatcagatatcactgcagaactccggatgaatactacgaagttggtgcttgtcaggtggtgttaaagcctgcttcaaagcccgaccaggcgggctttctggttcgtagtaggatggcggctttaaaagcttcagcttctcacagactagggaggcgtgctgtgtacagactttttgataacgtcgtcagatattccgagcactatcaaggactagataacgtgcatttaagtgaagacatgcaagacgcagtggccgagattaatatggcccacgtacctgctgccggtggtcactacctacaccatccgtttttattggattcaattgtacatctttctggtttccttgtgaataacggactaaggtattcctccgagtgggcctgtctatctacgggttttgacgagtggcatctactaaagccgctggaccctacaaccgtttatacgtcttacacgttcatggaagattccaggtcaacttccaatctggtcaccggcgacgtatacgtgtacgacggagaggagcttgtatcagttctaaccggattgcaatttcaaaagatgaagcgtacagccttgacacatcttttgtctcccccggcggtaggatctatggctgcaaagccttccacctgtatgccggaaatgaaaaggactgcactgacacatttgctttctcccccaactgttggcaatatggcagccaaaccgtctgcgtgtatccccactatggctcaaactgaacttttacccgcccaagcacgtgtcgccggatcacctgtcccaacgcctccggctaccgcttcagtcgatgacggagagggcgaaaaattcgacctagtgaatacacttttttctattattgcaagagaggtcggcgtagagcccagtgacttagagggagacgtgaatttggccaatctaggcatagatagtcttatggcaattacgattatcagtgtgatgcagcaagagacgggtatcgagttgcccggcaccttcttcctggataacgccacgactacggccgtgattgcggcggtgggt

SEQ ID NO: 24 - DNA, 1140 bp, Artificial Sequence
  PKSC8C
atgagctccgctgtcactgtctggcaggacgctcttaacatcattgctcaggaaagtggtttggagcccgcagaaatcatcgagactgacgataccgctttcgtcacacttggaatcaatcagattttggcgacagccatattagcacacctgagagggcccaggggagagccactgcccagagatatatttgatcagaagccaacagtgggagccttcaggagattttacgagactcccatacacctagatatcgcgccggtagcgccaatagccgcaccagcacctcccaaactaaagagagtcccatcctcctcagtacctttaagtatcgttttgcaaaataatccggcttcatcccgtcatgcagtttttcttttgcccgacgggtccggatcagcaatggcttacgcgaacctacctcctgtccatcctgccgtatgtatcgttggcatgaacagcccgtatttgcgtgatgccggttcttataggtgttccgtagaggacttagcctctcaatgggtcagggagatctaccgtagacagccgcgtggaccatacatagtcggaggttggagtgctggaggttactactcttacgaggtggcaaaaagactattgcaagacggccatgctgtggcaaagttaattctaattgacagcccttgtaggactgtgtttgaatccttgtccatggaggttgtgaattatttaagtagcagaaatcttatgggtaattggggatccccagaaatgccggaatggctagtacaacattttagatctacccttgctgccgtcgggaaataccgtccgcgtcctatcgatagtgcaggaaaaatgcagacctatatcatctggtccagagacggagtcttggatcaggacgcgctggcgaaaagtgggctggacacttcagtaaaggtctcccgttttctgttgcaaggaaaggatgacttgggccccaacgggtgggacgagctacttccatccaaggagatggcaattgcgacccaaagtggaacacatttcaccatgataaacaaacctcatgtagcacagatgtctgatttgcttagggatgcagtgattgggattggctctgacagacaaagccattggcagagagtctctgaatct

SEQ ID NO: 25 - DNA, 7536 bp, Artificial Sequence
  PKSC9A
atgagttctgaggcttccagccagtcaagagacgatattgcagtcataggcttatcctgtcgttttcctggagaggcagatactgctgaacacttttgggacttcatctgtaacggccgtaacgcctatagcgaaaaccccgatagatggaacccagatgcattccattacggagaaaagaaacttaacacatccctacctaggggcggccatttcatgaagcaagatgttgcagctttcgacgccaatttttttaacctttcaaaagtagaggccgagagcatggacccccagcaacgtatagttatggaagtaacttatgagagcatggagtcagcaggtttgcgtgtagacagactggcgggttcaagaacgggcgtgttcatggcctcctttacttctgattaccgtgagatgctgtatagagatgccgagacagcacccctttatactgctacgggcacttccaacaccagtacgtcaaaccgtgtcagctggttttttgaccttcgtggtccgtcattcaccgtaaacacagcatgttcatcttcattagtagcctgccatctggcctgtcagagcctttggaatggggagactgaatctgcgattgtcggtggtaccagtttacttttaaatcctgatatgttcctttatttatctaaccaaagattccttgctccagacggacagtgcaagtcatttgatgagagcggggatggatacgcgaggggtgatgggataggagtggtgatactgaaacgtgtcgcggacgctgtacgtgacggtgatccgatcagggctgttatcaggggcagcggctgcaatcaggacgggcacactaagggcttcacaattccgtcagttgaggcccaggcgtctctaatagaggaaacctatcgtaaggccggattatccctagcagagacgaggtatgtggaggcccatggaacaggtacgcaagcaggggatacatgcgagatggaaggaattgcccgtaccttcggacagcataggggggactccgacgatttactagtgggttccgttaaaagtaatatcgggcaccttgaagcttgcgccggcctggctagtctgattaaatgcatttttattctggaaacaggggtaataccaccgaccccctccgttagagtactaaacccgaaaatccgttgggaggaatggcatctaaaggtccctagcaaacaaaccccgtggccgaccgatggtttgagaagagtgagcactcaggggtttggatatggagggacaaacgcacatctgatattagatgacgccgcccactacttggagggacgttccctacgtggtcaccactacacgagaacccacccccaggctcaaaggttgctgacttccgccatccatggggcgtcacccaaggaacaattgccaaggctattcctgttccgtgccaacgacagggaggggctaggcagagtcagggcatcattagcacagcaccttgatcagttgctaccaagctggagccaggattcttcaggaagagatgcatatttgcagaatttagcatttacattggcttctcgtagaagtaacctaaaatggcaaacgtacgctacggccagtacgccagatgaactgttgcaagtcttgaagacaaaaggcgatgcgtgggcctcaccggaggcgcgtctggcggccagttctcccagactaggttttattttcacaggtcaaggggctcaatgggcccgtatgggagtcgagctgatgggatatccggttttccgtcagtcagtcgaggaatctgagcatttcctgagagagacgctggggtgtccctggagcgctattgacgaactagctaagcctcaaacgacttcaagattaagtgaggcggcgtattctcagactctatgtacggttctacagatcgccattgtagacttgcttcaggattggaacgtatctccgacaagagtcgccgggcactcatcaggggaaatagctgcggcttactgcttgggtgcgttgacaaaacaggacagtttgcgtgtggcatactatagggggattctatccagcgaaatgcaggagacccacaaggatcagaaaggcgcaatgatggccatcggtgcatctcctgagacggtggcgcaatggctagctcagttaacgaggggtaaggtagtggtggcatgcatcaactccccaacgtctgtaactgcatccggggacgccgccggtattgacgaattgttaagtatagtacaagaagcaggggttttcggccgtaagcttaaggtcgatgttgcgtatcacagtcaccatatgcaatccgtctctgctgcctattccgcgttgttaaaagatttaaagcccttgcctgcacacgagggtagaactatgcacagtagtgtcctaggaggcttaatcgatacggcggagttgggggcctcaaactgggtcagaaatctgatttcccctgtcaggttctctgaggcagtcagctccctgatattggatggcgacaaacctgctgtagacatgctaattgagattggtccccacgctgcactgaaagggccggttcaagagacgttagaagccaaaggagtttcagctgtcaagtacacgagcgtagtaagcagagggcaaaacgcggtgaagaccgccttagcttgcgcaggagagttagtcaacagctcagttccagtggcaatggatagggtgaacttagaatcagagctgcagccaagcccgctggtcgacctgccctcttatccttggaacagatccaccaggttctgggcggaaagccgtttgagtcaagaatacaggctgcgtaagcatgcgaggctacctcttctagggtctccctgccctactatgggcgccagggagcgttattggcgtggaatggtgcgtttggatgaagaaccatggattagggatcatgagatccaagggtcaatactttacccaggcgcgggattcttaattatggcgattgaagcagcatctcagcaggccaatgaacagaggaaagttagtgcgtttagacttcgtgatgtccatttagacgctgctctggtagtcactgacaattcaactgctgaggcgatattacaattacgtccgcacttacttgccccaggctcatcacagagcagttggatggaattcactgtaaacagctctattgacgggggtgcgcttcgtcaaaactgttcagggctaataatgatagaatatgaggcggatgccgattccgccatggcacgtgaaaggagtcttgaaagtgacacggtctgtgacctatacaagaagacatacatctcctgtcgtcaaagtgttgacgtggctaagttctattcccgtttagcttctttgggccttacctacggccctgctttcgccaatttaactgagattcgtcgtaccgggaacggacagtgcacgggagccgttagagttccggcggttgagagccttgtaccgccagcctacaggtctcaccctcacgtaatccaccccggaacgttagacgcaatctttcatctggcttttgccgcactggaagactctcttctacctggaccgatggttccaacaacaattgatggtctggtggtcgcagccaatacacccaatgaacctggaactttgttaagaggtgttagtcagagtagccctcatggtttcagagaactaatttcagatatcgacgtcttagatgaccaaagctccagagccgtcgtgcagatcaagggctttagatgtgcagacgtatctggcggttcagctaattcttcagatgccgaacctgcagaggctcgtcctatcagttttagattgaattggaaacccgccatcgatctgttgagtgcagaacaactgcgtaagtatgtgggaagagtagccaagcaggccgacgcctctagtcaccttataagagcgacagagctgaataatcaagtgggtaacctaccagaaaccgctccgagtgcagcgcttgatgcagtaaccgagaaagcgactagatggttcgcggcgaagtcagcaaaactagtggatggtgctgccactgcatcctcagcttcctcttctggtgggtacgttgatgcgactagagatgcctgggccgcggtgagggaaggaagaatcccctctcctgaaaaacaagacagggtcttacgtgaggtagaaaaaaatggtgctctgagcacattgttaggcgcgctggacgcctatatggatttgcgtcaccatgcgaagcccaatctgtccgtccttgagctatctctagatgccgtaccctactcaatatttgccgcgctgccctccaggcaatccatactgcagaccgcgcagtatgccatacgtgtgtcacaggatggagttcaggatagaatcaggtctcagttcggctcacaggggagcgggatcgatgtcgctgttactgacttcacccagaaaatcgatgaaacactgggaaaacatgacgttattttaattttcgatcctggtttccttcacgcaaagcttgaggtagtgctgagaaatgcaagaaagttactaaacccaggaggaaagatcatagtagctgaggtgaatgaaccaggcctgtaccttgggactgctttgggatgtctgcattggactagaaatttggatgtttcccaatcaagttggacaagctgtctgagtcgttttggacttacgcctgcacttgaactgattgacgccaacacagatgccacaggccatggcaagtttcaacttagactaactgggtcagcggctgaatccaacggttcatcatcccaccagccgcagcaagtgactctaatagaatcagccgatgcctccgaaatggcccaaggtgtggcggaagccgtggcgcaaagattgcaagaagcttcaatcccgacaaagagagtgcattggggatgcgacgtaagtcaactaaagggacagccttgcattgtgcttaccgatcttcagagtgcgctactaaaagatttagcccccgaagatctggccgctctacaatctctatttttacatgccgagagtacactttgggttactggtccccttggacctgacgcggctctaattaccggactggcgaggtcagtatgcaacgaggcagccggtgttcaaattcgtacacttgaggtaacggatctacctatatccgccgctgccggctatgccgatatggtggcccgtgtgttccgttacaggggaagtgacaccgagttccaatggcactcagatgcccttttagtttcaagacttactgaggatgaagatcgtaacgaggagattgcgcaattgttggggcaaggcgagacggcggcggccgagactactctgcaagagacgcctgaaggccttaagctttgtgtcaggcagatcggcatgttagatagtgcttgttatgagccagaccctctagcacttgaaccgctggaggctggcgaagtggaagtggatgtgaaagcatccggggtcaattttagagatgtcatggtcgcgcttgggcagataccggatagagcttttggattcgagggagcaggtgtcgtgagaagagtccatgcggaggaatcaagactgagacctggcgatagagtagtgtttcttgcccatggtgcccataggactgttcacagggtgcgtgctgactatgctatgccgatgccggatactatgagttttgaggagggcgctgcagtgctactggtccacaccacggcctggtacgcccttgtaaagtcagcgagagcaacagctgggcagtcagtccttgtccacgccgcagctggcggcgttggacaggcagttctgatgctagctcgtcaccttggattagaggtctttgcaacggtcggttctgaggaaaaaaggaagttagtacatgaaacttatggtataccacatgaccacatgtttaatagcagagatagttcatttgcgatgggagtgaaaagaatgactaacggcagaggcgttgacatcgtggtaaatagtttggccggagaagctctaaggcaaacttggcactgcctagcaccttttggtacgtttgtggagcttggcatgaaggacatattggataatgcgaggctggacatgaagccctttttgcaagacgcgactttcgtcttcttcaatctgaacagggtgcaaaaagagaggccagatctaatgaaagaagctctgagagaaacgatggctcttgtgagcagcggggctctgaagccggcgacgccgttgacagcctacgctgcttcccaggtagaaacagccttcagaaaaatccaaaccggtcagcatttgggtaagcttgttctaacatttcagacaggtgacgtattgagagtaattagaccggatctttccttaggagattctggcgcctacttattagtagggggcttgggtgggttggggcgttctctggcgagattactggttcatctaggagctaggagactatgctttctgtcaaggagcggggcgaaatcctctgaagcgcaggctctggtacaggaattagaactgcagcatagagttagagtcttggtatgtcagggagatgtttccgattccgacactgtggcacgtgttgttcagcaatgtactaccaccttgggaccaattcgtggggtagttcaatgcgccatgatactaagagacggactttttgaaagaatgactcatgagcaatggacggaatctactagacccaaagtgcaaggaacttggaaccttcatgagcaaattccgtcagccgacttcttcattaccttgtcaagctttgccggagtatttggcagcagaggccaatctaattacgcggccgctggagcctacgaagacgccttggctcacttcagaacatctctgggacaacgtgcgattaccatcgacctagggataatgcgtgacgtaggggtgttggcagagcagggtattactgattacctaagagagtgggaggaaccgttcgggataagggagcacgagtttcacgctctgatcaaaagcgctataatgagtgctactgagccgcctactgagaggagtgttgtacagatccctacgggactggctactgcaagatccgcacaagctgcgggaatatctacccctttctacttcgatgatgcacgtttctccatcttggcgcagacgcgtacagccgccggggcgtcatccgcaaacgccgacgatgggaaagtgtcaatacgtacgcagctgtctcaggcccaatctgtagccgaggctgcaagtgcagttcagaccgtgttacttgaaagagtcgctaagacactgcagtcttccgtatccgagatcgacccgtcacagccacttcacagttacggcgtagattctttggtagcggtcgaaacagtcaagtggatgttcaaaactttggaagcaaaattgaccgtcttcgatgtcttaagcaacgtcagcatagtcgtactttgtgaaaagattgctactacttctaccctggtcaaattatcc

SEQ ID NO: 26 - DNA, 5169 bp, Artificial Sequence
  PKSC9B
atgagcagtaaaatcagggcgacgaatttcttactatttggcgaccaaacagttgagaaacttccggctatcagacagttggtcgggcacgcggcgagctcagcgcttttacaacgttttcttaggcaagtttgcgacgcggtccaattggaagttgccaaacttccgatgcacagcgagcagaggtctaatatcgacaagtttgactctattataaggcttgcagaaaacaatgctcgtttggacgaacccaatgagattgtggccacggtcctaatgaacatagctaggataggtgaactgatactttatgcggaagaggatcccaccgttttagtatctaaggggaataggaactgtattcttggcttctgcaccggtgaggttgcagcggctgcggccaccatagcgcaagactcaaacgaattggttgagctgggggttgaaatgacccatataatttttagaatggcgagagaactgaatcatagaagtctgatggtggatagaacgaatggcccctgggctaagaccattctgggcatttccgtcgagcgtgtacaggagatattacatgagtttcatgagtctgagtcaatccccagagtacgtcgtgtctgtgttgggttcatcgccgagggatggctgacccttttcgggcctcccactacgctgcagaggttatttgaatggagtgttgaattagaggatgcgccccaaatagcaacggacgcgcgtggcggagtgcacatgaaaactatgcctgacgtggacgtggattggatcctgggaagcagcgtctggttggacaggacgccagtccacacggccacaattttttctccatatacctgtcagccccgtcaacaacagacgttgaggggactactaagggagatcataacagatgttgctcaaagaaccctttatttagcaaaagccatgaacgccgcactggaatttacaaaagcggatgagctgagggtggttatgccaggccatacaagtcacgatgtatattttctgaaaagtctgcagaaaagaggcatcgagtattccgtaatgtctcatggagactccccaccgagtgccccgggacgtcaaggatctggcttggtggccgtggtcggaatgagcggaagattcccgggttcaggtgatatcaacgcattctgggaaggtttgctagaaggaaagaggtacattcaggagattcccaatactcgttttgacctagagaaatggtacgatgccacaggcaaggtgaaaaactcaactatcgcgaggacaggagcgttcttagacaaacccggtatgtttgacaatagactttttgatatgagcccgagggaagcaatgcaaacggacgtgcaacatcgtttgcttatgacaacgggttacgaagcgttggagatgagcgggtactcacccgacggaactcctagtacggacacgagccgtatcgcaagttatttcggtcagacatctgacgactggagggaggtcgttgtacatcagggcgttgatatatatttcgccactggctcatgcagggcatttggaccgggtagactgcatcaccactttaagtggggtggtccatcatatagtgtcgattcagcatgcagtagctccatagcggcggtcggtttagcatgtagtgctctgttaggtcgtgaatgcgacatggctttggctgggggcgggtcccttttattgtctcccagcccatttagtggactaagcaggggaggctttctgtcagcgcaaggcggctgccaaacattccacgataacgcagacggatacgtgaggggggaaggtgtgggagtagttgtcttaaagagactggaagacgctttagatgaccaggacaatatccttggggttgttcgtggctcagggagaaactacagttccgacgcgtccagtatgatgcatcctagtgcaaacgcacagaagcagttgtacagggacgtattagagcaaagcggtgtggaggcgaattccatttcttacgttgaaatgcatgggacgggaacccaagcgggcgatttcatggagatgagctcagtcttgtcaacatttgccgagaaacgtggggcagacaatccacttatcgtaggagcattgaaggcatccatcgggcacggcgaggccgcggccggagtatgtgcgttgattaagacgctgatgatgttacaatgtaggaggatacccccgcaacctgatctgcctggtcctataaatcacagatttccggacttagcggctagaaatgtatacatcgcagcaaggaatttgaaactagaagcgagcccgatggcaaaaggtgtgcttcgtatgttcctaaatagctttgacgcatctggaggaaactcatgtttactattggaggaagctccgccaagagcggtgaaagatgaggacgctcgttcacatcacgttgtaacattatcagcgcgtagtcaaaagtctctaatcgggataaaggaaaaatatctagcgcatctttcccaaaacccaggcatcaagcttgcggatcttgcgtactctaccaccgcaaggagaatgcatgggttattaaggtatgcgatcgcagcgagcagtgtagatgaggtgatgaactctctggaaactgatttagctcagggtaagaccccgagacaaccgcctgtcgccccatccatcgtcttcatttttactggacagggtgcacattacctgggcatgggtagtgaactttggaaaacctcagctatgttccgtaacacgttacagaaataccaaacgatggcgtctgccgaaggtttgccctacttccttgacctaatcgtagggaatagcacgtctactcaacagagcgggcctgacactgtgcaggtgcagctggccatggtttccttagagttggcactggccgagctatggagaagctggggcattcaaccggcgatggtcttgggacacagtctaggggagtacgcggcgctgtgcgttgcaggtgttttaagcgtgtcagacgctttatatttggtatacaggcgtgcacagatcatgacagaagcactaacggcctcagaatatgggatgcttgctgtgaacttaagcgtctgtgatacccgtgaggttctttccagtggacaacacgccagctgtgctgtagcatgcataaatgctcccaaaatgacagtagtctctgggcccttgccgaaactggaggaactacaaaatcagctaaagtctgacggaacacgttgcacgccactttccgtcccatacggattccattcctcccaactagaccccattctggatcaatttgaggctgcatgccagggggttaccttttcagctccgaaggttcccgttgtatccacgctgctagcgactgtcgtgcgtgaggaaggaacctttagccccggctatttggcacgtcaggctagggagcctgttgacttcgtcggagctctaggcatggtacaagagcaatctcttgccagcctggtttttcttgaggttggaccagagcccgtatgcagcgggttagtaaatgcgacgttatccgcaggggagacgaaagcaagatgcttcgcgtccatgcacagaggccacgagaattgggcttctataagtagtagcctacgtgacttgtacatggcgggagcccctattgattggccggcgtttcatcatgactttaagtcatccgtgagtcttctagacttgcctaagtattctttcgacgagaaagagttttgggccagctttccgaatagggacatgcagggtacgggagaagtagaaccaaaacaatcacagccccctgttattgtcccaagcgtgcaaggttactgtacgacgacacttcaaaggatagttaaggagactgatcagcccgatggcctatccgtcactttcacaagcgatcttgcggaacaacacttgagggcagcagtcaggggtcatgcggtggccgacattgaaatctgttctagtagcctgttattagacatggccctttccgcggctcaatatgcatatctaaagcacagtccgggtcagaagatgcccgtaccgctaaccgttagaaattgtttttttcatagagcggtggtccttaccgaagaagctcagaccgtcgaagtaaccgttacctttaggtcttctacgaagacggctgatattcagtactattgcagaacgtctgatgagtactatgaatttgggagttgtcaagtgaccttggaagcaccaaggaaacccgatcaagcaggtttcttagtcaggtccaggatcgctgcactaaaagaaagcgcctcacatagattgggtaagcacgctgtctatcgtttgttcgacaacatagtccgttattccgagcagtaccagggattaaaaaacgtacatctgagcgaagatatgcgtgatgcagttgccgagatcaacatgacccaagtacctgccgcgggtggacattatctgcatcaccctttcctgatggactccattgtccatctttcaggattcttagttaacaatggtctgcgttattctagcgagtgggcatgcttgtcaaccggtttcgaggaactgcatttgctaaagcctcttgatcccgccacagtttacaccagctacacgtttatggaagattcaccgacaacttcaaacgtcatcggagacgtatatgtctatgacggcgcggaactagtctctgtagtcactgggctacaatttcagaagatgaagcgtacggccctaacgcatctactatccccagctactgcgcgtaatacagcagcgaaaactataccgcatcgtcccactacagccccggctaaagcccttagcgaccagcagccaatcaccaccatccaggcggaagcagcagttccacaggccagtacgccgtctaccgccgccagcgtgaacgggggggaaggtgaaaaattcgatctggtcgaaactctatttagtattatagcaagagaggtcggcgttgattccagtgacctgaagggtgatgttaatcttgcgaatcttgggattgatagtctgatggctataaccataatatccgtaatgcaacaggaaaccggaatcgagcttcccggtacgtttttcttagataacagtacaaccacagccgtcattgctgccgtcggg

SEQ ID NO: 27 - DNA, 1152 bp, Artificial Sequence
  PKSC9C
atgtcctcagccgttactgtttggcaagatgctttagaaatcattgcacaagaatccggcttagaacctgctgagattatagaaactgacgacatggagttcgccaggcttggcatcaaccacatattagcgacagccatcttaagtcatcttagagggcccaggggagagccgttgccaagggacattttcgatcagaagagaactgtaggggcgttccgtaggttctacgaaacctctattcatttagagactagtcctatcacacctatacttgcccccaaacgtgcacagctaaagcgtgagaaatcttttactgtcccattgagcatagtcttacagaactcacccgcaagtagcaggcacacggtgtttttattgccggacggctcaggatctgctatggcatatgctaacctgccacctgtgcacccgactgtttgcgtggtgggaatgaacagtccatatctgagagatgctaactcctataggtgctcagtcgaaaacctagcttcccagtgggtacaggaaatttatagaagacaaccacgtggaccatatatagtgggtggatggtctgccggtggctattatagctacgaggtggcgcaaaggctgttacaagatggtcacgtagttgataagctaatactaattgatagcccatgtaggactgtctttgaatccctgagcatggaagtagtcaattatctgtcaaaacacaacctaatgggtaactggggttcccagggactaccagattggcttgtacaacattttaggtctacgttggcagctgttggcaagtaccgtcctaggccgctacactccgtaggagaaatggaaacctacatcatatggagccgtgacggcgttcttgagcacgacgctctagtagaaagtgggttagacatgagcattaaagtgagtagattcttgctggaaggtaaagacgatctgggaccaaacgggtgggacgagttactgcccagtaaagatattgcaatcgctacgcaaagcggtacccactttacgatgatcaacaagccgcacgtcgctcagatgtccgatctattacgtgatgcggtcacagggatcacgacggacaggttgtcacaatggcagcgtgtcaggaaagacgaacaggggaag

SEQ ID NO: 28 - DNA, 6840 bp, Artificial Sequence
  PKSC10A
atgtcctcagatcctcagcaccgtatgctattggaagtcacgcatcaagcattagacagcgccggtttagcggctcactctctagcgggaagtaggaccggcgtctatgcggcacacttcacttcagactacagggaagctatttttagggacgcagaagcggctcctctgtacacgaacacgggaactaatgccacctccgcctccaacagagtgagtcacctttttgaccttagagggccttctttcacagtagatacagcgtgtagctccagcctagtagcgtgccatttagcttgccagtccctactttctcgtgagacagatacggcgttagtaggtggaacgtccctacttttaaatcccgatatgtttttatatttgagcaaccaaaaattcttaagcccagatggacaatgcaagacgttcgacgctgctggtgatggttatggacgtggcgagggcgttggtgttttacttttaaaaagggttagcgacgccataagacatggagatccaatcagggcagtgatcaggggtactggttgcaaccaggatggacacaccaaggggtttacgatcccttcagtcgacgcccaagcagccttaatccgtgaaacctactcaaaagcaggactagatctagcacagaccaggtatgtcgaggcgcatggcacgggtacacaagctggtgatactagagagatggagggtctgtcacgtaccttttcccctcatcgtagttctgctgacaagttgttagtgggcagcgtgaaaacgaatattggacatttggaagcatgtgccggtctagcaagtttaataaagtccatttacattctggagtcaggaattatagctcccacagcttccgtgcgtgtgcctaacccaaaaatagaatgggaccaatggcatttagcggtgcccgctgttcccacgccatggcctaccccggggcttagacgtatctccacccagggcttcggttacggcggtacgaacgctcatgtaattttggacgatgctgctcattatcttcaggcgaaggggttgtcaggtatccactatacgaggacagccgagccaagtacgaggcgtgcgccagctacggaccaaccgcgtttatttcttctaagggcgcacgacggggatggcttaaagagagtgagggcatctctggcacaacatctagttcagcatctggaccgtccaaatccctggcctgatagcgcgacatatttacacgatttagcccatacactgagttcaaggaggagtcaactacagtggcagacattcgtcactgctgctagcgaggctcagcttgtagaagcgttggggcaggattcatggccgaatcctgaattgaggagagccgcaactgcgcctaggttagcattcatctttacggggcagggggctcaatgggcgagaatgggagtggacttgatggcttaccctgtctatcgtcagagcgtcctagacagcgatcatttccttaggcagacacttggatgttgttggtctgcggctgatgagttggccaaaccgcaggcatccagcaatctttcacaagctgcatattctcaaactctttgtagcgtgctgcagatagcacttgtggatttgttagagcattggaatatcaccccaacacgtgttgccggacatagctccggtgaaatcgcggccgcctattgcctgggtgcgctatccaagcacgacgcattgagggtagcttaccataggggaacacttagttcagaaatgcagcagacgcataagcataggcagggcgcaatgatggctgtgggtgccagtgcaggacaagttcagggatatttaccaagactaacacgtggcagggtagtcgttgcgtgcataaacagtccgtccagcgttaccgccagcggcgatgcggctgcaatcgacgaactgttagacctggcccagaaggatggccttttcgccaggaagttacaagttgatgtagcataccactcacaccatatggaatccgtcgcgactgcctacgcgcaacttctggccaatatggagacacaacctgcgagacctgggcgtagtatgcactcatccgtgctgggggggcctatagacgccagccagctaggtgcggccaattgggctatagatacgttagtcgagatcgggcctcacagtgcacttaagggtcctttacaacaaatattgaaagactgtggactaacaggggtaggttacgcatcaatgttaagtaggggtgcacatgctatcaaaacggcgttggcttgcgctggggagctagttatcagcggagtacccgcggcgatggggcatgttaacttagaagctgacgcacgtccagtagttgatttaccaccgtatccttggaaccacagtgcccaattttgggccgagtcacgtttgtcccaggaatatcgtctgaggaagcatccacgtatgccccttctgggcagtccatgccctacaatgggggctcgtgagaggctgtggaggggctttatgcgtttggatgaagagccttggatcaggcatcatgagatacaaggctcaatcttgtaccccggcgccggttttttaacgatggcaatagaggccgcagcacaacaggcccgtgaccaggacgcgtccgtgtctgcatttagactaagagacgttcatctggacgcagctttggttgtaactgaagactctagtgtagaggccatactacagctaagaccacatcttccagcgccgggctcaagtaccgctagctggctagagttcaccgtcaactccagtatcgataaaggacctctaaggcagaactgttctggtctgattatgttggaacatcatgcagatcctcactcagctatgggtagagagcgtgctttagacacagataccctatgccagagatttaagcagaccagacagctgtgtagacagccagtggatgttcctgatttctactcaaggctaactgcgcttgggcttagatatggcccgagtttcgcgaacgttacggagattgaatgtgctgaccaaggtcgttgtgttggggctgttcgtataccagttctggatagcatgggcgataactcacacgttattcatccggcaacgctagacgcggtatttcatcttgctttcgcggcccttgatggagcatctttgagtgcgccaatggtgcctacatctatacaggagttggttatcgcagccgacaccccttctacgccagggactttgttgagagggctatcacactccgaaccgtatggttttcgtgagctagtcagtgatatcgacatgcttaatgaacaaggcacgaaagcgttaatacaactgaaagggtttaggtgcgcagccctaagcactacaccaacaccggttgcggacggtaggccaattgctttcggggtatcatggaaacctgctgccgcgttgttaaccagtaaagagttgcaagcgtatatctcaagatcagcggtaccgtgtactgtttctgtggactctgaatcattggataagtccccaagcagttccgcgctggctgatatggaatctaaaggtgcgttggctgcgttagtccaacctttagacgcatacattgcccttaggcgtcacagcaagcctaatttgagtatagtcgagttaaccgcacaatctgtaccctactctttgtttgccgcgctaccaagcagacatagtcttttacagacggcgcattatgcgatcgaggcttccgcacaggcagcgcgtgaccagataaaatcccagttcggtcccttggcttctgaaattgacattaccaccgacgtgcacgacaagcacgacctggtgttggtattcgactcaggcttaagcaaagcgcagactgaagcgctagttcaaaaggccgccaagttgttgggccctggcggggctattatactagcagagttgaaggccaacgaagcgaatagctggacctcatctcctttaagcgctttagacctgacgcctcctctgaacttagtcgacagtcaaagtcagggctctaagcattttagactttgcgtttcagacactgcaccgaagccgaatggtgtgaagcaccatgaggctcagcaggtggcactgattgagaccgccaacccctctaagttggcccaagccatcacggccgccgttgcccagcgtctacaagacgcaagtatctctgcctcaaggctttcttggccatgcgacgtctcccagttgaaaggtagaaagtgcattgttctagcggacctagaaacagccttactgaaggatccgagccccgcagaccttgcggctgtccagagcctgttttcccacgccaatcaaactttgtgggtcagcggcccccttgggcccgacgccgccttgatcactggcctggcccgtacagtccgtaacgaggcagtaggtatacagttaaggacactggagctggcggatgtggctcttacggacgcagatgcgtgtgccgatgcagtgtgcagagtctttgacgcacacacctccgacgacgaatttagattggtcagtgcaacgttgcaaacgtccagactagtggaagacgaagaacgtaacgaagaactagcccaaatgctgggaagaaaggaaaaaactccggtagcttctaaaatacaagaaccaccccagcccattaagctgtgtgtgggccaagtgggcatgctggactccgtctgcttcgagccggacggcttagctcttgaaccactaggcgaggacgaggttgaaataaacgtgaaagcgtcaggagttaactttagggacgtaatggtagctctagggcagattccagataggaacttcgggttcgaaggggccggtatcgtgaggagggtaggatcagccaaaaccggattcagcgtagggcaacgtgtgatgtttctggcacacggagctcacagaaccgttcatcgtgtcgcagcagacttcgttgtgagcatgccagatggtctaagtcttgtagatggggcagcgctattattagttcacacgactgcatggtatgccttagtgcgtactgctagggctactgctgggcaaagcgttcttattcatgccgctgctgggggggtaggacaagcgttgttgatgcttgctaggcacctaaggctggaagtgtacgccacggttggcacagacgaaaaaagaaaactagtaagggaacgttatggggtacctgatgatcatatatttaattctagagatctatccttcgtagccgggatcaaacgtatgacaaggggtaggggggtagatattatagtaaacagccttgctggggaggccttaaggcagacttggtactgtttggccgccttcggtacgtttgtggaggtaggaatgaaagacatactggacaatgcccgtttagatatgcgtccgttcttgagagacgcgacttttgcgttctttaatttgaaccatgtgcaaaaagaaagacccgacctaatgagagaagctctgcgtgagacgatggcccttgtgagagccggtgttctggaacctgctactccaactacgtcttttccggcctctcaagcggaaacggcattgagaagaatccaaactgggcaacacatgggaaagctggttctgacttttgacacaggggatatggtgcccgtgctgagaccaagtgtcgggctttctgcgtccgggagttacttattggttggtggtcttggaggattgggccgttctctggcacgtttgtttatctcccttggggcaagaaacttatgcttccttagtagatccggtgcagagtcatctggcactaaggcttttatccacgaactagaggcccaggcgggtgtaaaggtcctggtgtgcaaggcagacgtatcacacggagagcatgtagcccaagcggtacaacgttgcacagccactcttgggcctatacaaggggtggtacagtgcgcgatggtactaagagatggattattcgaaagaatgacacactctcaatggttggagagtacccgtcctaaggtccaaggtacatgtaatcttcaccatcatgtaccaagttccgcctggcttataaccttgtctagtttttcaggcatctttgggaatcgtggacagagcaactatgctgcagcgggggcataccaagacggattagcgcaattatgccacgctcaaggtaggcgtgccgtgacccttgacttggggatcatgcgtgacgttggggttctagccgagaagggtataaccgatcaattgagggaatgggaagaaccctttggcataagagagtcagagttgcatgcactggtaaaatccgcaatcatagctactactcaaccttctggtagatcacccgcccaaattccaaccggcctggccactgcccgttccgctaaagccgcagcgataagcccacccttctacttcgacgatgctagattcagtatgctggcacagacgagattggattcagcttctagtgcaactgcctccagcagcagcccgtcagatggagataaaccgtcagttgaatcacaacttgcgcaagttcactcagtagatcaagctgcagcacttgtgcagacagtgttactagaaagagtcgcgaaaactcttcagtccgcgagcagcgaaatcgaccccagccgtccgcttcattcatacggagtagactcactagtcgctgtagaaatggtaaagtggatgttcaaagctttacatgctaaagtaacagtttttgacgtcctgtccaacgtacctattacagcgttgtgcgagaaagtagcatccgtctctacgttggtaaaaatcgac

SEQ ID NO: 29 - DNA, 5124 bp, Artificial Sequence
  PKSC10B
atgagttcattggacacgggtgatttagactttatcctatttggagatcagacagtagaaaagttgccagccataaggcagttagtgagccacgcctcagagagtaggttggtacaaagatttctgagagaagcgtgtgacgtcgtacagatagaagtctctaagctaccagcgcactctgaacagaggaggggtatcgggagttttgactctatcctgaggcttgcggaagataacgcagccctagatgagcctaacgaaattgtggcaacagctttgatgaatatagcacgtctgggtgaatttattctgtacgccgaagaggatccatccgttttggtctcaggcggaaagcgttccaggatactggggttttgcaccggcgaattagcagctgctgtggcggccgtcgcccaagactccgcccagctggtggatttggccgttgaggctacggggataggcttcagattggcaagagagctacatagaaggtggacgatggtagaggctaccaacgctccatgggcgcgtacggttcttggtgtaccggcggacagggtagaagctatattacaagaattccatgaaagtgaaatgataccgagagtcaggcaggcatgcatagggttcgtctctgataattggctgacaatttttgcgccaccaaaaactctgggaaggttgttttgctggagttcagagctggaagaagcaccttctatcgatacagatgctagaggtggcgttcatatgcccactctgcctgcgcttgatatagattacatattaggaagctccacgctactaacctgcgtgcccagcccaaaggccgtcatgacgtcaccgtatacgtgccaacccaggagacaggcaactttgggtggattgttcgctgaaatcattgacgatgtagcccagcgtactctgaagttgtcagcatccatcgatgcagcccttgataacatacaagtaagaaagctgagggccgtgctgcccggttatacggcgcacgatgttagtcttctaaaggcccttaaaaagaggggtattgagtatacagtgatggcccatggctcaaaaccagcagcccgtagttccggaagacagggttcaggtagggttgcgatagttggcatgtctgggaaatttcctggttccggagatgtcgaaaccttttgggagaacttaatggaggggaaacgttacatagaagagatcccgaatactagattcaacctggaaaaatggtttgataagactggaaagcagaagaactcaacgctagccaggaccggagccttcgttgatcagccaggaaagttcgatcatagacttttcaatatgagtccgagggaggcgcttcagacggatgtgggacaccgtctacttatgaccactagctatgaagctcttgagatggctggctatttccctgacggcacaccgagtaccgctcgtgaacgtatagcatcttacttcgggcagactactgacgactggcgtgagatggtagttcaccaaggggttgacttgtacttcgccacagggaactgtagggccttcggtccgggcagactgaaccaccactacaaatggggcggcccctcctattcaatagacacggcctgcgcgtcttcaatctctgccatcacattggcttgcagtgggctgttgaatagagactgtgatatggccgttgcgggaggtggcagcgtccttgtgagtccacatctgtttagtgggctgtctcgtggtgggttccttagcgcgaacggggggtgtcagacctatcaagatgatgcagatggttacgtgagaggagaaggagtaggcgttgtagtgttaaagagactagaagacgcattagacgaagatgacaggatattgggtgtaatttgtggatcagcacgtaattactcttccgacgcatcatcaataatgcatccgtcagcaccggcgcaggaggaactgtaccgtcaaatactgggtcaagcgggaaccgatcccaacagcattagttatgttgagatgcatggtaccgggacacaggcgggcgacttagtagagatgacctctgttctttccatatttgctcaaaaccgtcgtagggacaatccattgacagtaggtgcagtaaaggctaatattggtcatggcgaagctgctgccggagtctgcgcgttgatcaagacacttatgatgctgcagacgcgtcaaatagccccgcaaccccacctgcctggtcctaggaatcacgagtttccggacttggaagcacttaatgttaggattgcgggcgccaacatgacattggatccgtctcctttggcgaaaggcgaagtccgtatatttgttaattctttcgatgctagtgggggaaactcatgcctactgcttcaagaagcgcccatgcctagaactaaggttgccgacccaagaacttcacatgtagttacgctaagtgcgagatcacacaaatctttagccggcatcaaacaaaggtacctagattatttgagacaacatccccacacacagcttgcagatctggcttatactactacagcacgtaggatgcattctagtctgaggtacgccatggccgttagctctattgagcaggcagtcttatccctggaaacagacctggtaaaggataaacctccaaccgtggcgtctatcgtttttgtctttacgggccaaggggctcaatacgctggaatggggtctagattatggcatacgtcaccgactttcaggagtagagtaaacgatttacaatctgtggcgacggctcttggtctgcctaggtttgagcacctgatctccgatgccaaggcaggccatgaggaggctgatgctgtgcagatgcagttagccgtgttagcattggaactggccttagcacatctttggcaagcttgggggcttgtcccagccgctgtcttcggtcatagtcttggagaatatgctgcgttagttgtagccggcgtccttagtccgagcgatgcgttgttgctggtcggcagaagagctcagataatagccgcaacacttgccccacatgaatatgcaatgttggctgtaaacttagatgtagatcgtgctagggctctgttggcgggaggggaacatccggaatgcgccgttgcttgtatcaatgcaccggcgatgaccgtcgtgagtggcccccgtcagtcattggactccttgcaaaatcagctgaaggaacaggaaacaagatgtaccaggctggctgtaccctatgggtttcactcctgccaattggacccaattttagccgaattcgaaagcgcgtgcagaggtgtagaatttggagcaccaaagattccagtgatgtctacgttgctggcatccaaggtagatgcgtctggaaccttcagtccatcctatcttgctagacagtccagggaaccagttgatttcgtaggtgccttacaggctctgcatcagcaggcactgccaaacatggtctttgtcgaaatagggccggacgcagtgtgttccggactagtagcatcaaccatgcgtagcttagatacgcagccggcgtgctacgcatcattgcaaaaagataaagacgactgggcctgcttatcatccgctctttccaacttatatatggctggggtagccattgattggcccgccttccatcgtgatttcaaagattcagtctcacttcttgatctaccaaaatatgccttcgatgaaaaagaattttggcaatcttttcctgatccattggttgagggcaatggaggaagcatcgaagctcatactaaggcacaggcacagtatagcaccacccttcaaaggatcgtagccgaaactgttcagacacatcaggtatgtgtggtattcgagagctctctggatgatgtccacttgagagccgcggtccaaggccatgcagtagctgacgcgcagatatgctcttcaagtctgctgcttgacatggcgttgtctgccgcagagtatgctcttagcaagcatgcacctcatcaagccatgtcatgcccgttatctgttcaaaagtgcatcttcgatcgtgcactagttctgggtccggaggcgcagacactgacgttgactgctactcttgacgtctctaccaaaatcgtgcacgttgactatacgtgcagaacagctgatgaagtgtttgaattaggacgttgtcaggtccacttagctccagcaagtccattgcctgatgcgggtttcctagtcagaagcaggattgccgcactaaaggcgagcgcaggccatcagttgggaaagaaggccgtgtatagactgttcgatagtgtggttcgttatagcgaagagtatcaaggattagctagagtgtatctaccagatgatatgcaagacgctctggcagaggtgtccatggcgcatgtaccggtggcaggagggcactttaagcaccatcctttcttgctagatgccatagtgcacctagggggattcctagttaacaacggtctaaggtacgcatctaacgttgcatgcttgtccaccggttttgatgcgttacatatctttaaagctctgaggccagacacgacctatacgtcatacacgtacatggaggattctgccacagcagcgaatctagtttcaggaaacgtctacgttttcgatgaccaggaattagtagctgtagtatcaggaatgcacttccacaggatgaaaatggctgccttaaggcatttgctaagaccggctaatcatggtgccgccacgtctacgaaagctacgacgcaactgccagagcctggggtatgtgcttctgcggcatctgctgcctctgcagctccggcagcacctgcagctccagcgccagccaaggtcgaagaagagaaatcctccagtagcctggtagagcaattgtttgacatcatcgcaagagaggtaggtattgaagcaagtgatctgcagggaaacgtggacctaggcgaactaggcgtagattccctaatggcaatcactattatttccgttatgcacgcagagacgggtgttgaactgcccggtacctttttcctggagaactccaccactggacagatcggtgcagcgatcgcggccagggga

SEQ ID NO: 30 - DNA, 1095 bp, Artificial Sequence
  PKSC10C
atgagctctgcgctgacggcttggagtggggcacttcgtataatagcagatcaatctggacttgagcctgacgagatagttgaggcggatgatatgcaattcacagcactgggtatcaataggatcttagctggtgccattttaagccagatgagaggaccggggggagaggcgttacctaaggatttttttgacagggtaccaactgtcggcgcttttaggcgttactatgaaaaggcggcaccggtgagaccagctaaattgacgcgtaccctgagccccatagcactgtctataatattgcaaaaaagtccagcagttgcgaaacatgtcttatttctattgccagatggttcaggatctgccatggcatacgccggtcttccggcagtgcatgccgatgtgtgtatagtcggtctgaatagtccacacctaagggacgcatccaagtatacggggactattgaacagctggctgaaacttgggtgcacgaaatttacaggaggcagcctaaggggccttatatggtcggcgggtggagtgcgggtggatattattcattcgaagtcgccaagagacttcttagggacggacactcagtggataagcttgttttaatcgatagtccgtctagaacggtgttcgaatcactacctattgcggttgtcagacatctagccgcacgtaaccttatgggtaactggggctctcaagatccaccagagtggttaattcctcactttcaggccacagtcgctgcagtcgccaagtatcatcccacacctatgagcagagcttctcaaataaaaacttacctaatatggagcagagatggtgtgcttgatacacaaggcatggcgagttctggccttgacgctagggtaaaggtcagcagatttctattacaggggaagcaggactggggccccaatggctgggatgacttgttgcccggacaggcatgtgcaatcgcaacaaccggtgggactcactttacgatggtcaataagcctcatgttgccgaattgtccgctttgttaagtgatgcagtagccggcacatgcccacagagacagcatctgtggaagcaagac

SEQ ID NO: 31 - DNA, 7242 bp, Artificial Sequence
  PKSC11A
atgtcatccgccgtggacgaagcaaggtgggctcaagacatcgccgtcgtaggcatggcatgcaggttcgcagacgatgccgacagcttcccaaaattctgggattttatctgtaaggctagatctgcttattctgaaaaccaagatcgttggaacccggacgctttccactacccagggaaaaaaataaacacaagtttacctaggggagcccactttttcaaacaggatatagcaactttcgatgcgaatttctttaatatttctaaagtagaagctgagagtatcgatccacagcaaagaatggccatggaaactacctttgaagctatggaaaatgcgggtatctccacagacaaattatctggaactagtaccggagtttggatggcaaattttacgtctgattaccgtgaaatgctgtttcgtgacagcgaaaccgctcccatgtatacgttgagcggtgctagcaacacttccacctcaaatcgtatctcatggtttttcgactttaagggaccatcattcactttaaatacagcgtgttcctcttcactagttgccacgcatcttgcttgccaatcactatctttgggtgagtcctctacagctatcataggcggtacctctctgctattaaaccccgatctgttcctatatttatcaaaccagaatttccttagcccggacggcaagtctaaggcgttcgatgcatccggcgacggttacggcagaggtgagggtgtggcggtaattatgctgaaaagagtcgcagatgccatcgccgatggggatccgatacgtgcggtaattaggggaacgtcatcaaaccaggacgggagaaccaaagggatgaccttaccatctgccgatgcccaagagcagctaatccaaacagcttacagaaatgctgggctgagtatggccgaaaccaggtacgttgaggcacatggtaccgggacccaagccggtgataagactgagactgaggcactaagtaggactttttcaccgcatagaacgttctcagagccactgatcttaggttcagtgaaggcaaatataggacatttggaggcatgcgcgggcctggcctctatcattaagtgcgttggcattttggaaactgggcttattccagccaacccctgctacaagaatggaaatccgggcattaagtggagggagtggaatttacacgttccgacaacattaatgaggtggccaacaaaaggcttgcgtagggtgtcaacgcaagggtttggctatggtgggactaacgcacacgtcattctagatgatgcttaccactatctagaatcacgtgctcttaccggtagccataataccaagttgttagcagggctaagtacaaagcctcgtttacccaacggtgtgccaaatggcgtgggaagcagaggcaaggattcccattcccgtatttttcattttagtgcgcaagataatgacggtttaggcagaaccagacaagctgtaagtcagtacctaaaaactaggagcaaggagctaaaagaggcgcacgattcagaagatgaatatcttcgtaatttggcctatacattgtctgagagaaggagtaggctgcaatggcagacgtcaactgtcgcctcctccatagaagagttgattgagagtttgcaaactaaaccctggccgaatccagagatccgtgcaaccagcaaattccccagggtaggattcgtttttactggccagggtgcccaatggccgcgtatgggagtcgagctgatggaatacgacatctttcgtgagtctgtggagaaatctgatcactatttattggctgagctggattgcccctggagcgcgatcgaagagattgcaaagccagactctagttccaaccttggcttagcaagctattcccaagccttgtgttctgttttacagatcgcgcttgttgatttgctaaacagttggaatatttccccatgcgccgtagtgggacattcatccggcgagattgctgccgcatactgccttggtgttttgtctcatgaagacgctcttaaagccgcctattttagagggtctctgtccgcggaaatgaaggaaaacgatagtagcttaaggggttctatgatggcagttggcgctaagccaacggaggtagaaaagtggcttgagaaagttacaaaaggagacgtcgtcatagcgtgcgtgaacagtccgacatctgtaacactaagcggggatactgaaggaattgaggaactagagcccatgttgaacgaagctggcgtgtttgctagaaagcttaaggtagacactgcgtatcatagccctcatatgcaaatcattgctgggcagtacttcgaggctatcgccgacatcaccacaatgccggctaaaaagggttgcaggatgcacagtagcgttcaaggcgctttaatagacccaaacgagctgggcgccgctaactgggtaagaaatttagttagcacggttcaattcgccgacgcagtgcatgatctgcttcgtcccttaaccaatggggaaagggccaccgaaaatgccgtggatatcctggtagaggtcgggccacatagtgcgctacagggcccggtgtctcagacgatgaaaaattatggtatctctggtgtaaattattgttctgttctgtccaggaagaagaatgcaatcaacacagcccttagttgcgccgccaccctatattccgagggattatccgtggacataagaactgccaacagggactccaactatacagctaaacctttagttgacctaccctcatacccatggaatcacagcgcccagtattgggctgagtctcgtgtatctaaggaatacagactgagaaaacattctaggatgccattggtaggggcgccggccccgtccatggggggcgacaagatttggaggggtctaattcgtcccgctgaagaaccatgggtcagggatcatgttatacagagtacagtactatatccggcagcgggttttttgacaatggcaatagaagcagcgaggcaaaatgcagagcctggcaagcaggtttcaggatttcgtttaagagatgtgtcaattgacgccgccctggtcatcgatgacgatgttgagcctgaggtcgtcttgaggtttcaacctcacaggatgggaacccttgatgctggttccatcagttggcatgagtttacggtatcttcatctaccgatggaaaagagcttcgtcaaaattgttctggattgttggccattgaatataagcccgctgaggggtcttctatgcaaatagaaagaattaaagaaattgaatctattaaggagcgttcaatcaaggctaaggaacagtgtgaaacgtatttagatgtaggtgagttctattctcatctagatagcgtgggattgacatacggggcaacgtttgcaaacttaactgagatccatactgacgctatcgcagggctgggcaccggtaggctattgatccctgatatcgagagcgcgatcccgccatatatgagcgagcgtccgcatatcatccacccgactgtactagacgcaattttccaccttgcctttgcggcgatatctgatcacccaagaagcttcaaaggcgccatggtaccgactagcattgctgaggtattagtaagcaacgatataccctttcataaaggagaaagcctgcaagggttcgcgcagtccacgagacatgggttcagggagttaataaccgacataaatgtcttcgacgaaaattttaacgatgccgtcgtgcaaatacgtaggttcagatgtgcagatgtcagtgggggcggggatgccggcgatagtaccgaggggaacagtgttaaacccattacctttagaactgttcaacgtccctccttagacttactagcaccagaagagctgagaaaaattctaatcagcagcagttcagatacaattgatcaaaccctgaagcaatctaccctggacttgataaaagaaaccctaattaaatgcctgttgttattgcatcatgttcaacctgaattaagtatattggaaattgtagactccaccagccgtagcatcacgggatccctacttccacaactaaattgcgccgatgacattctagagaccagcaactataccgtgagtgtcaagaatgaaaaggtagccggggcggttgcagatcagcttggcgtatttaaggaccgtgtgaatgttgaagtcaatgccttggataaagacgaacgtagtgaaggcggacagctagacctaatacttatgtttaacacagttctggataaccctagttttcagacgctgttggagaacgctaagaagcagcttaaagaaggaggcagaatttgtataattgaattagggcaaccctcacttcacttgggcctaactctagcgactttgcaccaaactgaggacgaccacgaatttcaacttgttatagggaaaagtccgaagccggcatcaagttccataccagaagaaattgtcatagtagaagctccccaagcgactaactcagctcaaaagcttgcaagtcatttggctgaggagttagggcgtcagagcatccgtgtcaacagactagagtggacgtccaaaaattacatatcttccattgaaggccgttcctgtatcgtgctagcagatctagaaaaagcgcatctacttcaagctagtccagatgagttcagaatcatccaagaaactatactaaaagctggatcaatcttatggatctccggtagcattggaccagacgccgcgctagttactggtctggctagaacggttaggaatgaagtcccaggtagtgagattagagtcttacagattaacaatactccattggattcagtgagcgcttggagcaagcctatattacgtttgttacagagcacaacggctgatacggagtttactctagaaggcggggtgttccacatcactagaatagtggaggatcgtacgagaaatgaagatctggctattgcgctgggaagacaagagccaaaactgacgcagacaagcctgtctgaaatccccggcccggtgaagctgtcaatcaagaatccggggatgctggattcattgtacttcgagcctgactacacgccagagacggacctgccagcgggtcaaattgaggtcgatgtcaaagcgtctggagtcaactttagggacgttatggtttgcatgggtcagatcccggacagcctgttgggttttgaaggggctgggatcgttagacgtgtgggggataatattacgaatttgcaggtaggggacagggtatgtttcttggcccacgggagtcatagaactatccacagagtccccggagagtacgcggtaagaatcccggatgaaatgagttttgaagaagcttcaggggtccttttcgtgcatggcactgcttggtacggattggtcaagatcgcccaaattaaagcgggccaaacaatcctgattcacgctgcagcaggtggggtagggcaggcggcggtaatgctggcgcagcactatggactggaggtttacgcgaccgtcgggtcccaagacaaaaagcagctgatccaggacttatataacatacccgacgatcacatcttcaatagccgtgacttgtcctttgtaaagggagtcctacgtatgactgacggtctaggtgtggacgttatcctgaatagcctttcaggagaagcgttacgtcagacatggcattgtattgcaccctttggtacctttatcgagataggcatcaaggatatactggggaatactagattagatatgcgtccttttctacaagacgctaggtttgctttctttaactttaatagagttgaaaaggaaagaccgaaactaatgagtgaggccttaaaggaaacgatggccttgatttcctcaggagcgaccaaaccagtgagcccacttaagaagttcccgatcagtcaggtcgaggaggcttttaggctgatgcaaacggggaagcacagaggtaaacttagcctgagttactctcccaccgacgtcgttccatttttaggcgaagctgcgagaccagttaggttaaacccatcagcggcttacgttctagtagggggattaggtgggttgggaaggtcactagcacagcatttcgtccaattaggatgcaagaagctgtgttttctttctaggtccggaggcgccggcgagaaagctcaggagctacttaaaaacctgcagcagcaaggagtagaaacgcttgccctaccttgcgacgtgtcagattcccagtccgtgactagggcgatcgagcagtgcaccactagccttggcccgatcagaggcgttgttcaatgtgcaatgctgttgagagacggcttatttgagaaaatgagtcaccagcaatggattgagagtacgaggcccaaggtgcagggttcttggaacttgcatcaatcattacctcacgtggacttctttattattttaagcagcttcgctgggatcttcgggagtcgtggacaaagcaactataccgcggccggcgcgtacgaggacgcactagcatcctataggaggtcacttggattaaaggcgatcacgttggatttgggtatcatgcgtgatgtaggggtcttggctgagcagggaatcactgattatctaagggaatgggaggaaccttgcggcatacgtgaagtggagtttcatgccctaatggataacgttctggccggcgaactattcggggatcaggggagtttacctgccaacatacccaccgggttggccacggagaaaacagttcaaatttccggtatttctaagcctttctacttcgatgatgcgcgtttctctattcttgcaaccgcgggcgcactgcaagataccaccgggagtggcgacacctcaggcagtggaaagaccgcaagcgtacaaacccaaattgctcaagtgacgagtgtcgcggaagcagcctcagtcgtaacgggagcgctggtggcaagagtggccaaaagcctgcaatcttctgtatcagatatcgacccatcaaggcccttgcatgtctttggtgtggattcactggttgccgtggaagtggtcaattgggtctttaaagagatcaaagctaaggtaactgtcttcgacatacttgcttctgtaccgattactagtctggctgagaaggtcgcattgaaatcaagcctactaccgcagtttacc

SEQ ID NO: 32 - DNA, 6150 bp, Artificial Sequence
  PKSC11B
atgagctcaagacaggagatctcaaaccaagaacagtgtttgcttttatatggggaccagacggtagagaaattacccgcaattcgtgccctggttcagcagtctcaacgttctgaaatcggcaggaggtttttgcgtgacgcttgcgatatagttcagcaggaaacattccaacttcaaatcgagagggcgaagattactcaatttgatacactgctacagttagcagaaaacaatgccagatcagaagagccaagcgagattgtcgcgacagtactaatgaatgtggctaggctaggggaattaatcttgtacgccgaagaggatccacaaattctggggtctgcagatcgtccgacccacattcttggattttgcaccggagagatgcctgccgctgtcgcagcgacagctcgttccataccagagctatacaatctttccgttgaggtcttacgtgtgatatgtaggttcgctcgtaatattatcaggcgtagtgttcttatcgatagaactaacggaaattgggctacaacgatcgttggtttaccgactgaacacgttcaggcgattcttgatgattttcatcaatcacagaagattgcgccgctgcgtcaaatatgtatcgggtttattagcgttgggtggctgacgctattcggcccacccacgactgtcgaacagcttttctcttggtcccgtgagttggatgaagctagtaggataaaaacggacgcgggggggggtgtccacatgagtaatttaccggaactggacctagatgaggtagttgggtctagtagcgtccttgaggtcccgatcaatccaaacgcgaagttttggtctccctataattgcgaaataaggagcgcgcctacacttagggacatgttgcatcaggtcgtttccggaatcgctcaggatgcgatcagactatctgagactattgatttagtggttaagtctttaaatcactccccggttaaaattgtcagtgtaggttacacacaccatctagctactttgcagaagagcctacaaagggccaaaatcccttttactgtgatgcagcattccaattctcccgaggacctatcaggcccgttggtgaggggcgggagcgaccttatagccatagtcggtatgtccgggaggttccctggctccgagaacgtccaggattactggaaatctttgcttgacggagagcgttacattagggatattccgcccgaacgtttcaatctggacaagtggttcgacgcgacaggaaaacaaaagaacgcgactgtcaacaggaccggcgcgttcctggacagacctgggtattttgataacaggctgtttaacatgtccccgagggaggcgatccaaaccgaccctctgcacagactttttctaactgtctcttatgaagctctggaaatggccgggtatagtcctgacgcaacgttaagcaccaatagcaaccgtatagcaacgtactttggacaaacgtctgatgactggagagacatcttactgactcagggtgtggacatctactacgcctccgggatatgtagggcttttgctcccggcaggttgaactaccattttaaatgggggggtccttcttacagtatcgacgcagcctgcgcctcctctgttgcgaccatatcacttgcctgttcagcgttgatggcgcgtgaatgtgacacggcgttagcgggaggtggatcaatccttgatagccccgctccatttgctgggttgagccgtgggggattcctaagtcccgagagggggtgcgagactttccatgaggatgcagacggctatgtcagaggtgaaggcgtaggcgtggtggtactgaaaagattagaagatgccatagccgataatgacaacatactaagtgtgattaggggtagtgctagaaactataacaaaggagcgtctagcatcacccatccatccgctgaagatcaacaaagattgtatcagcaggtcctaagtaacagcgccgtcgacccgagtagcgtcgcgtatgttgaaatgcacggaacaggtacccaagctggcgattctacagagatgtcttctgtgctttcagcgttcgggcatggaaggtctaaagagaaccccctagtattgggtgccgtcaaggcatccatcgggcacggagaagccgctgcgggtgtctgcgccttgattaaagtactaatgatgctgcagcaacgtacaatcccgcctcaacccggtatgcctttccaaatgaaccacaggttcccggatttaggaagaatgaatgtccatatcccctctggggccatgcccctatattccgccgataaaaattctaagcttagggttttccttaatagtttcgacgctagtggcgggaactcctgccttttattagaggaagcgcccttaaagccggtgaaaggggtcgacccaagaaaacatcatgttgtctccttcagcgctagatccccctatagtttgcgtgggatcaaggagagatacctggagtacttatacgaacatccaggaacatccctagtcgacttggcctatagtaccacggctaggagaatgcaccatacgtccgttaggtctgtcttcaccgcatcctcaattgaggaattcactaagattttggaggaagacctgtcaaagccagatcctagtgtcaagaaagggaagggcagtccgcccggtagaaacgtggttttcgcttttactggacaagggtcccagtacgcgggtatggcccaccaattgtggaactgcagcaccgtctttagaggcctgattgaatctatccaaacaatggcaactgcacaggggttgccgagcttcgtagatctaatagctcaaagtgatctggacttatcagagacgtctccagtaaatacgcaacttgccatcgtagccgtcgagatcgctctagcccagctgtggatctcttggggtgtaaagccctctttggttattggtcattctttaggggaatacgcggcgttatgcattagcggggtgcttacgatctccgatacagtctatttagttggccaaagggctcttaccctagtacagtccgcgaaacaaaatgaatacgctatgttagccatcaacggagacgttgacactgcccgtcagtacttaagcaaaggaacctatgacacttgcgaagtggcatgtttgaatgcacccaaatccacagtcgtgtccggtagcttgccggaggtgaaagcgcttaagggcgagctagaagcgcaggggactcgtagtactttgttacaagtgccatttggcttccattccaaacaaatggatcctatattagattcttatgagtcttgtgcgaaaggcgttgccttttccgttcctcaaattccaatagctagcacgcttctgggagatgtcgttcaagatgaattcgttatctctccggtctacctgcgtagacaaacaagagagtcagtgaattttgtcggtgcgatcggcgctgcacaagcaggagggtttataggaaatgacactttgttcttggagatcggcccagacccggtatgtatcagcctgatacgttctaccttaggagcggcctccgtgcctcgtctattgagctccctgagaagaaacgaagataattggctaacaacctctaactccctggccaccatttatgaaaccggcttgtacgttaattggccagaataccatagagagtttagtggatgcttgagtttactagacttgccgacgtacgcgttcgacgagaaagatttctggatgccataccccgacccggaccaacctcacgctatagaaaaaacgcagttggcactaccaagtattcccgcagtgcctggatttcctaccaccactctacaaagggtaaaacaagaagccatagatgaaggcaagattagtgtaacttttgagagctccacatctgagccccaccttttaagtgcaatcgtagggcatgcggtggcgggtgttacgatctgcagttctagcattttttccgacatggcattgtctgcggtcagatatgcctttgagaggttgcatccagggaagtggacggatgagttcctgactatcagcagtctgaacctgcatagaccaatcgtgattgccaacggtcagccgagtcaaactattgaggtgaacgtcaaattagagagtaatacggaaaaagcgcaaatcaccttttcaagtcaggcgggtgatgcaactcatagcgtcggttccgctaaagtgagcttgcgtgatgcaggcaactggcaacaaaacatcagtcgttcattattccttattaggagtaggatagacgcattaaaagaagctaagaacaccacgaaggggcaacgtcttctgcgtccagtagtctatagactattttcaaacgttgtcgactacggcgaactataccaaggcttagaagaagtgttcttagatagcgaactgagagatgttgtgggacaaatcaaattacctacgcttccgagtggtgaaagcagtggtacatatttatactctccctacctgctggacgccatcgtgcatgtagcaggctttttggcaaattgtggactacgttaccctgaagacgtagccttcctagccagttcattcgaggcttggcacattttgaaacccctatcttcccaaaaagcatacacgtcatacgcacacatggaggaatctgctgatggtaactctttattgggcgatgtcttcgttttcgaggataacgttctggtcaccgctttaattggagtgcgttttcagaaaatgaaaaaaatggctctgacgaaaatactacaatctgccgctccgggcagtacggtacagaaagggacgggaagtcaatacgtcggggaagcagaatttgaaagcccaagctccagtgccgatccgtccacttttaccacaccaagagcgactagtgtagcaacttccgttacctctgtggatgaggatacaggaattatcgataaattccttacagctgtggctacagaagtggggtgtgaggtatctgaactggagcctgacactgtctttgctgatctgggcgtggacagcctgatggccatcacggtcattgcgtccataagaaacgagacaggggttgaattacccggtagtttcttcttagatcaccagaccgtggcagaagcaatgaaagagcttaaaggtgggggcgacagcggggtggcaacacctcagtttacaccgcctgatgcatcaccaaaggtcggcactgagcccgtggaaaatagtgtggcagagtctaccatccccccgcaaccccttgagaaccagaatccaccagcctccgaatcaaaagctaagccggaggaggccccggcaagacccgtaagtctaactactaaacccgcgcccgcattgcttctacaaggcagtatgagttccactgaggctcctctatttctgttagccgatgggactgggtccgtttctagctatattcaactgccagccttaccgggtggaagacgtatttacgggattgagagcccatttgcacgtgacccaagcgctttagtagatgtctctgtcgagcagctagtaggcgtctttgtgagctccatacgtaagatacaacccactgggccgtacagcatcggcggttactctatcggtgcaatatacgcgtttgaggtgagtagaagacttctagaggcttccgaggccatctcagagcttcttctaatagcaaatcctgcgccaattgctgcacccactaagttacgtggacgtgagataacctatggtactctacaagagggagggttcgcgtacgcaaatagtagaacaaaggtggcaatcagtgggagacaaaagcaacacttggcggctgctgttcaagctttgctacaatacgaacccaagtctcttccacaggaaagccgtccaggccacctgacactaattataccgagcaagggcttgggagacgccgcgagtacagctgagaccccattcaccgcgtggctacatgcgaactgggacagctctaaaaatttgggctgggaatccctagtcggatccatagatactgttcataagcaggagactgattgtttttcactattgaagtatccagaagtatcttttcatctt

SEQ ID NO: 33 - DNA, 1194 bp, Artificial Sequence
  PKSC11C
atgtcatccagcgttacgtttgactcaatgtgggctgaatgtctacgtgttatcgccaacgagactgggtttggcgtcgatgacattgacgatgatgatgacttcacgacggacctaggtgttaacccgattgttctgagatcaatggtcaggtgtctaaaagtgattcttaagcaagacatccccagcgcggtatttactcagtatcccacgattaaagagttcagagaagggtatcttcaagcgtgcttcgaatctgagaagagtaggccacaatcccagcattccgacaaatttcccgcgcttgtggttggcaaaaacccgaagaacactccgaacaagaccaagagtagaatccccgtatcaatggtgttacaggggaagccagctacagatgaatccacgacaaatatctttctgttgcccgacggttcaggatccgggatggcctacgccgcaatgccgcacatatatccctactcagtttgccttattgcgatgaatagcccataccttaatagcgccactgaatacaggtgttctattaacgaaattgcgcgtcagtacgtcaaggagattagacaaagacagccacatggcccctacatcatcgggggttggtccgctgggggttactacagtacggaagtcgtcagggaactggcgaggcagggagagagggttaggaagttgattcttctggattccccatgcaggccagattttgaagacttaccgatggaggttgttgagtatcttagcaggaacaatttaatgggtaattggggtagtaacagtagaatcgataatgttccccaatgggtgcttgcccactttaggtccactctgagagctgtgcgtgagtatatacctgagccagtcgactctactgacggtcctgaggaggtttgcattatctggtcaagagacggtgtactgccaatacaagaactggagaagactggcttagacctgtctgtacgtgtaagtaggttcctactggaggggaagccggatttaaccagggcctatggatgggatagactttttcccgaatcaagattttctatatcaagcatgcctggcaaccatttctccttgatcaataagcctaacatcaatgaacttgcggtgctattgcgtgatgttgtcactgaaccttcacagaggcaaaggagctggtactctttccaa

SEQ ID NO: 34 - DNA, 7098 bp, Artificial Sequence
  PKSC12A
atgagttcaccgcttatgatatctccggagccgacgggtgatgacatcgcggtcattggcttggcctgcaggtttccaggtgaagcctctggtccgcaagagttctgggatctgctgcgtaagggacgtagtgcttactcttcagcctcaaaaagatggaatgttgatgccttccatcactccaaaagggggaggttggggacttccgtggcaggtggcggacacttcctggagcaggacctggcggcctttgacgcggctttcttcaatattagtcaaaatgaagccagcagcatggacccgcagcagcgtctgacactagaagtttcatatgaggctttcgagaacgcaggtgttccgatcgataaattgagcaacagtcaaacaggatgctacatgggcggctttacgtctgattggagagaggccatgacaagggacgccgaggcagctcccatgtatactgggaccggggtgggtagtgaatttatctccaatcgtgtatcatggttctttaacatgaagggtcccagcttcaccttaaatacggcgtgttcttctagtctagtggcctttcatttggcctgtcagagtttgcgtacccgtgaaagcacaatggcgatcgccgggggtgtatctgtccatcttaatcctgacttttttatgtatctatctaaccaagggtttctaagtcaggaggggcgttcaaagacttttgatgcatctggtgatggctacgggcgtggtgaggggtgtggtgtagtagtccttaagcgtgtagaggatgccattagagatggggataatatccgtgcaatcgtccgtggtactggcgtaaatcaggatggcaaaacgaaagggattacactacccaatgctgtggcacaagccgagttgatacgtagtacctatgcttccgcaggccttgatttaggggatacccagtactttgaagcacacggaaccgggacgcaagccggtgacccaaccgagttggaggctgtctcactaacaataggtgcggctctagctgctgacaaaaagattctagtgggaagtgtcaaacctaacataggtcatgtcgaggcctctgccggtatagcgggtgtcattaaaggcgttctggctttagagaacggccttattccgcctaacattctatttaacacgcctaacccaaaaatccaatttgaaaaatggagagttcaggtacctacggcccttacaccgtggccgagcgacggcgttcgtagaatgtcagtaaatagctttggggcagggggcacaaacgcgcacgcagtactagacggggctgaacactacctgcgtgaacgtggctatcaattaaccggcattcagggtataaagcctggaagtgaacgtgctacaaacggtccaaggttgtttgctataagttcacacgaccaggatgggttagcaagacagagggagtctcttgctaaatttatacaatcccaagtggcgaacataccaagcatgaaacaggatgtttatctgaacagattagcgtacacattgtcagagaggaggagtgccctaccatggaagagtttcgcgattgcagcgaatattgaacagttagtcgaagaattaagggctagcgtaccgcctagcgggaggtctaaagacgggccgaggttagggttcgtgtttactggacagggcgcccaatgggccaggatggggatggagttaagacaatacgatatatttcagtcttcattggaatcagcagaagcattcttcaagaacgaattgaattgcccatggagtgtgattgaagagatggagagggaggagggagactccagaataaacttgccagagttttcacaggccttgtgcactgttcttcaggttgctatcgtcgaactgctttccagttgggggattacccccgtcgctgtggctggacattcctctggggaaatcggggcggcttattgccttggtgctcttaccagggaggatgcatggagcgcggcatactggagaggcgtcttatctagtcagatccccacattgaatcccaacttaaaaggatcaatgatcgcggtggggttgagtgagggggacgcggaacagtacattgcaagggtttccaagggtagcgtgactgtagcatgtgtcaactccccgtcatccgtaaccgtgagcggagacactaccggagttgatgagctacaggagctgttaagacaagacggagtctttgagaggaaactaaaggttggggttgcgtaccacagctctcatatgcaaacaattgcagcccagtacttagaggcaatctccggaattaacacggctgaatcccatcctgagagaaccatgcacagctctgtcagcggggatctagtggaagcggatgaacttggtccgatgtattgggtgaggaatctgactaaccccgtaaggttttctgatgcgcttggttctttggtgttgccaatagatgaatccggtgagcaagttaagacagctgctgtcgatatccttgttgagatcggaccacatagcgctcttggggggccggtgaagcaaattttgagagaaatagaagtgaaggatgtcgagtatcaatcaattctgagtcgtggaaagtctgcggtacagacagcattggggtgtatcggcactttgtcactgagaggtgtacctgtcgaaattaaggaagtaaatcagtaccacgcttctgggagtacgctgacacctctacatgacctaccagcctatgcgtggaatcacacaagaaccttttgggctgagccaagagtaaatagagagtatagatttcgtgagcatccaagatacagtcttgtaggagcgccactacctagaatgtctgagaacgagagggattggaagggactgttgcgtattagcgaagaaccgtggataagagaccacaggatccaaaatctagttttgtatcccgcggcagggtatatagcaatggccatcgaaggggcgaggcaactggcagacaagtccagggaaatctctgcatttaaactgagagatatacaaataggtgcagcagctacagtgacggacgatgccgacgtggaaattatgttacatatgcgtccacacgcgaatggtacaagggacaaagccttttcctggtgggaattctctattagtacttgcgctgccggtcaagaattgagacaaaattgtgcgggccttatgcttgttgagtataagagtgatgaaggtagtgcaatgagcatcgaaaatgaaatagcagctatcgctgccactgaacaatatgccgatattaagagttcatgcataacccaagaggagcctgccaagttttatgaggatttggcaagcctgggtttaaattacggtcccacattctctctagtcaccgaaattagacttggtaatggtgtatcttgttgcactgtagaagtagctgttcacggtagcaccgtcgttccacctgccagtgtgaaaaggccctatattatccaccctacaacattggatgcaatgttccacgccgtctttgctgctttgaaaggaccttcaggtgtattgaagggagccatggttcctaagagtattgaccagataacaatcgcggcagatatcgatatagcagagaaaagtgtattccatgggtttgctaccgcgagcaaacatgggttcaaggaaattatgagcgacgtccatatgttcgattccagcttaaggaaccatagtgtctcaatcacgggattttgctgtgctgatgtggcaggttccgttgagatgaccgatgcagcagctgacgcagttaacctgtgtacaagtaatacgtggctaccagccatcgagctattgtcctccgaacaactacaaaaggtagtagaagacttggcggccaatgcaaacaccagtggcttgtcaactataattaagcttatagcacaaacgaagccagagagctctgtagtcgagtttggtcaaacgggtcttccactgttgtctggcatttcagctagccacattggtagcccactaaattatatgttggcttcagcggatggggaatggttgaaggaggccgagggaaatcttaaggattccggactgtcaccccaatttacgcttctggacgaaaaaaaggagttgagtgggtcaggtttcgatatcgcgatgtccgactttactccgggtgattctaccgatcttaatacgatactggagagatttggatctatcgtaaagcccggcgccaaagtcctgtttgttgacaacttaccaacgggcagtgtggacagagatagtgtattgcttaagcatggatttcacttagatttctctacggccgcgggccaaacgaatttaacagttgcttccgtacctgttactaatggaaacgggatagtgacagacgaaatcatcatcctagaacccgctgttccatctttgacggctgacgcggttgcgactcaggtgactgcacagttagatgccgcgagtattcccagcaaaagaataacattgcaagcgccattagctgagttaaaaggtaaaagatgcatctcccttatcgaggtggagtccagcttcttggaggacctaagcgagtctgggttcgagtctcttaagagcatcttacttgagacgagttcattagtctggttcgtaggggttgacggacccgcggctagtctgatagccggcctagccagaactgctaggaacgaaatagcggggttacagttgtccacattacaggcacccccgggaagcttcggttcatatgaaaacttagcttccagtattgttaaagtaattactagccctataagagacaatgaactaaggatagagaatggtattctgcaggttagcagattgctggaagaccacggtctgtcaggcgccattgatgggttacagaggggagaaaaagtgctaaccccgctatcccagacggtgagaccgcagaagctagtcgtgcaaaatcccgggcttttggatagtctttgttttgaattggacgagtccttggaggggcccatagcggacggtgaggttgaaattgaggttagagcgtcaggagtcaacttcagggacgtgatgacggctatgggacagatcccagatgaatccgtgggccttgaagcaagtggagttgtaagaaacattggcaaagatgtaaccagattccagataggagatagagtctgctgcctggcgcatgcggcccataagcctttaatacgtgttcctgtagtccaatgccaacgtataccagaacatttaagcttcgaggagggcgcaaccttgcccatggtccattatacagcataccacgcgttggttaacttggccagaattagaaaagggcagactgtccttatccacgcggctgccgggggcgtgggtcaggcagctattcaaatcgcacaacatttcggagctgaagtattcgctaccgtaggaagcgacgcaaagcgtacgcttattaaagatttgtatggtattcaaaacgaccatatttttaattctagggatatatctttcgtaaaaggtctgttgagaatgacgaaaggacgtggagtcgattgcgtgctgaactccttgagcggggagatgctgaggcagacttggtattgtttagccccattcggggtctttgttgagattggaatgaaagatatcctttccaacactggcctagacatgcttccctttaagaaacatgccacgttttgtttttttaacttagagaacatagccacgataaaccccaaacttatcgaggagatcggacttggagtctttgggttattagagcagggattcttaaaacctgtagcgcccgttaccgcttatccggttagtcaaatggaatccgccttcagacttatgcaggcagggcgtcaccaggggaaattggtgttgtcttatagtcctgaggacgtcgtgcctatgttacgtagagccgatgacgctcttcgtctaaatccagacgccacgtacgtgcttattggcgggttcgggggtcttggtagaagcctgcttaggatgtttgccgcttccggggcacgtcatcttgccgtttttagccgttccggggtcgcttctgccgccgccaaagcatgcgttgcggaactagaacagttagggacgcgtgttcaagtctaccagtgcgatgtgtctagtccctcagcggtcaaagatgcggtcgagcacatagaggagaaccttcctcccataaaaggggtgatacagggtgccatggttttaagggacgtcctttttgagcaaatgtcttaccaacagtggatcgagtcaactaggcccaaggttcaaggtacctggaatctgcatcaattcctgcccaatgacatggattttttcataactctatcttctttcgctggcgtgttcggcaaccagggtcagggaaattatgccgcggcaggcgcctatgaagacgcgctagcatattatcgtcgttcacagggcttaaaggctgtcacaatcgatttgggcgtgatgcgtgactctggtgtccttgcagagcagggaacaacggccaatcttaaagatttcgagcccttcgctatttctgatgttactttccacgctatgataaaaaaggtgatcgtcgatgaggtgagtgggttgtcaacgccagcccaaataattacgggaatgccaactgggaagacggtgcaagcagccgggataagtcgtccttacttttttgatgatgctcgttttagcacgttgtcattggccggtgaacaaggtgaagagggtgcgggtggtgaagtttcaatagagacgcagatatctgggctggcgtcccatgaggaagcggttccactggtacaggaggcgctaatcaacagggtagctaaattcctgcagacctctccctccgaaattgatgcctcaaaacccttgtatcattacggcgtggatagtttagccgcggtcgagatgagaaattgggtgttccgtgagatcaagtccgacatctccctgttggaagtgatgtccgcttcacctataagcaagttaagccaagacattgcgttcagatcaaaggcgattgccgca

SEQ ID NO: 35 - DNA, 6186 bp, Artificial Sequence
  PKSC12B
atgtcatcctcaacccaacactttttattattcggagatcagacagtggacttagtgccatctctgcatcgtcttttgtcaatttctcaatcttcccagacagtaagacgtttcttgcagtccacgctagatgtcgtgcaagccaatatttctgctttaggcagtgatgaacgtgtaaggatcgggcactttggatcattcgaggatttgttgcagagatatagtggtacagaggataccattggcgtaatccacacggtcgttatctgtgcgtgccgtcttgcggagctgatactgttggtcgaaaatgatccatctttgttggggtcctcttccaaggttacagctttgggtttatgtacgggattgcttcctgctgctgcattagcgggtagccagaatataaccgaactaatagccatcggtacagaaacaatagcagtgtgtttcaggctggctctagaactgtatcgtcgtactagaaggatcgaggaaactcccggacactgggcgcacacagtacttggggttccggcacgtgagatggatgtaatattaaaggaatttcatgcctccatgaacgtaccaacacatcgtcaagtgtttattggcgtagaggatgaaagttggcttacactatttggtccgcctccagaattggctcaattattttcttattcaacgaagatagaaagcgcgccaaagctgcaactagcggcgtacggcgccgtacactcaccacatctaccgataccagacctggatgccgtggtgggaaattcacctatattgagccgttcaataacttcacaggtgcaagtattgtgcaccaccacagggattccatattctgctacaacgttgcgtgatttgtatttgtccgtctgtagagagatcgtgcatagtagattgaaaatcgggacagtactaagagcagccgcccaaggactgcaaactaggagcccagtcctgttgaatgtaataggtcttacacaagcgacaccgatagttaaacgtgtcctagactcccatagactgagtgtaacattacatgacaaaccagttgggttatcagagcagagcgaagatctgagagatggatctaacaccattgccatagtaggtatggccggtaggtttcccggttctgagaatctagaggagttttggaaaagtttaatggatggattagacgctcatcaagagatcccgagcgacaggttcgatatcgaagcttactacgatccgtctggaaggagtaaaaacagcctgtccacaaggtacggatgctttttgcgtaatccgggtgattttgaccacagactgttcaacgtaagcccacgtgaggccgaacagatgtccccgctacagagattactattaatgtcctcatacgaagcattagagatgagtggctatactagtaacggtactattagtacacagtcacagaggattgctacatattttggacaagcggccgatgattggaaagacggatcccgtattgcagggatagatctgtactatgtccctgggcttcaacgtggattcacccccggtcgtctgaattaccactacaagtgggaaggtgcgtcatactctgtagacagcgcgtgtgcctcaagtgcttctgcgattggactagcatgctccgccttattgacccgtgagtgcgatacggccctggcaggtggagttaacagtataacttccccggagccgtactcaggcttgagcaagggatcctttctaagtcctacggggggatgcaagacattccaagatggagctgatggctactgtaggggggaagcagtaggggtattagtcttaaagaggctagaagatgccattcatgacaatgataatgtgttagctgttatacgtggatctggaaggaatcatagcgccttggctagctccataacccatccacatgcggaaacccaagtgagactgtaccacgatgtcctgcaaaaagccggagtgcaggctgaggaagtcggattcgtagagatgcatggaacgggaactcaggcaggagacgcggtagagatgtccagtgtactggaagtattcggtagaaataggaccaaaactaaccctctgattgtaggagctgtcaaagcgaacgtcggtcacaccgaggcagctgcaggggcagtgagcatgattaaggccatcatggcattgcagaagggcataattccaccccaacctggggttcctttcaaaattaaccataattatccccctttaaaagagctgaatgtccgtatagccgatgataaaataaacttccacaaacctagtgggggtaacggtaaaaggaaggtcatgataaataatttcgacgcggcaggggggaacagttgcttcataatagaggaagcacctcaagccaagccgaaacagaaggatcctagaagtcatcatactgtgacagtcagcgcaaggacgtcccttagtctaaagaaaaataaggaagcattgttggagtatcttacatgtcatgctgagacatctcttgctgatttagcctactctacaacggcccgtaggatacacgaagagttaagggtggcctatagtggagatagtatcgaaagcatcgtccaacagttaaggggtgacttatcaaacgcagcctcttccgcaacagcagccccgagagggccacagaagaagagcctggtatgggtattcagtggtcagggatcccagtatccaggcatgggaagcgagctatttcattctaatgcgacatttagaaacagcatacgttctatgcagagaatgtgtgacgcgcagggactaccttctttcgaagaattgataagtaataaggatgtggacgtggcccaaaaaacaacaatacaggtgcagctggcagtagtagccattgaattagcccttgcagacttgtggagaagctggggagttaaaccagacgtggtaataggacattccttaggagaatacgcagcactgtgcgtatccggggtattgtcagtaaatgatgcgctttacttagtaggtcaaagggccctattgatacaaaataggtgttccgagaatacctacgcaatgttagctgtcgtagcccccgctcaggcgcttgaagaatacttgagacgtcctgaatatcagagttgctgtatatcatgttttaattccccttcagcgacagtggtatctggacccgtcagcaatcttcaaaacttggagaaggctattagagctgccggaagtatctgcacgcttgttagagttccgtatggctttcattctccgcaaatggatagtatactagaagattttgaacacctatcccattctgtcaggttccagaccccgaagattcccattgttagtaccgtcacgggaagtatcgtttgcgatagtggttctatcacaccgaggtatttagcccgtcacgccagagaacccgtggaattcaacaaagcgctagcagcgtgccgtgtagagggggtggcagacgctcacactatatggttagagttaggccctgactcagtgtgtggtagtatggtgaaagctacgttgggcgccatgaacgtatatgggtccataaagtccaaggaacccaactggaaaacgatctcagtcaccgtggctgcgctttacacggctgggtcatcactgaattggtgtgacttccaccacgaatatacgaagagcttgaccctacttgacctgcccaaatacgccttcgacacaaagaatttttggaggatatataaagaggatcccgtatctcaagctgaaaacgttgtgactaaagcgactactatgagacacatctcttcatccctgcacacagtgaaggaacaagtaattacaaccgataaaatctctatcgtgtttgaaacctccttggccgatcaagatttatacgaagccataagaggccaccttgtggacgaactaccgctttgccccagtggcatcttctgtgacatagctttaactgccgcgaagtacgtccactccaaagtccataagaacgaggcatcacaaaaaaatcttgtgattaataacctagagctaaatcatccagtggtagtagcaagctctgatagtcagcaaactttgcgtatttctgctgatcgtgaagccagaaccggacatcaggtgaaaatcacatttcacctacaagacggaagttctacacaggaaattggaggatgccaggtaaatacgtacacaccgcaggaatgggagaatgattggagtaatacgtcttttttcgtaaagagtcgtatgtccagccttgtcgagtcagtaaaagcggggcgtggagaccatttgagaagatcagtaatctataagctgttcgcctccctggttaaatatgaccagaagtatcaagcaattgaagaaatgttttgggatgaacagtccaatgatgcagtggcaaatattagccttaagccatacaacggaaggggcgcgttcgagtacctgccttactggacggacccgttagtacatttggcagggtttgttctgaacgtagacttaacgagtacatcagatgatgtatggctgagttctggcgtcgcgcgtatgcaagtacacaaggaactgtcagccgagaccccgtacgtctcctacgtcagatcccatactccagatgaacacggtactgcaatcggtgatgtgtatgtctttgatcaaaacagactggtgggattctgcagtttagttttccaacgtatgccccgtatcgtactacataggttgttacataagcatgagcctagggcgcctacgaaagcctccggtagtacacaggccgtgttcgtacaaaaggtgcagaaaagtgttacagacaagcatgagcttcccgccactatgtctcaatctacaccggtatcaatagaaaacaatctagcgaacagactgatagctatcatcgcagaagagaccggcgcagatatggtggacatggtgccagccgccgactttgcttccatgggcgtcgattctcttatgggtatcactattattgatcgtgtccagaaggaactagacgtccagctagaggcctctttttttcaagaaaatttaacagtggcggatgcgcaaagggcgcttggatatgacgagacagacagcgagaacgaccagacgcctaatgctgacagcgatggttccaccccgaacggcatactgaccccaattagtcctcccgagtcagacatagaggagattttggtcgcacctaataagctattgagtgaggcaattcagatagcaacggaggccccgccagcagaagtgatcactgccccggctggtgttgagatcacgcctccgtctacatccccaagcactgagtacaagagtaacgtagttctaattcatggtagaaagaagagcggcaagactccgttgttcctgataacggatggtgccggctcagccactgcatatattcacttaccaagattcgctagtggcatgccgctttacgctgtagagtcccccttcgtccgttgcccactagagtataatttctccgttgaggaaaccgctaagatgtacatagccgcaatcaaaaaagttcagccagaggggccgtacatgttgggcgggtggtccgcagggggagcgcatgcttttgaagttagtcgtcagctactagaagctggtgataaaatacaaagactgataataatagatatgaaaatacccaagccgatgcccgagggtctagaagtgacaatggacttcttggacaaagtcggtcttactacaggaatcaatagggcgggccctgccctggcagggatgtctgaacgtttaaagcagcacctagcgagtactatcaaatctctaatggtttacaccgccagggaaatggatccatcacgtaggccagagaagagctacattatctgggcggaatacggcctggccgaaatcataggagatgccgcattcaaggatgtagctgatatgatggggttgaaggaggatgtcgaagggaatccgatggaggacgacacgggtttggcgagctggttttacagcaaaagagattccttcggacctaacgggtgggacaaattgctgggcaatgtcgtttgtagatccatgaaagcggaccacttttccatggttactccgccagctgtatccctacaggtccctatc

SEQ ID NO: 36 - DNA, 1236 bp, Artificial Sequence
  PKSC12C
atgagttccgcttccattaatctggtagaccacgtcctagagatcattgtcagcgagaccggagtgtcccccgatgaattgtataacgatgtatactttgctgacctaggtctagatgacattctatccaaactaataattgataggatcgcagaagtcactgcagtaaatcttggtcctaatgtgttccaaacttgtgacacagtgggatctctgaagcagcacctggcacagattgcctctcgtacgactagcggaaagaaaaacactatgcctaaactgatctctaccagacctcagaccaacaaagatagtgacttccgtcaagagaaaccaagttccttagctattcgtctacagggagacccccagaaagcccaacacacgatatttttgcttcccgatggaagtggcaccggaatggcgtacgctcgtattccgctgctagggccagagatatgtttgtatgggcttaactctccatttctgagctctttggagggtgcaactgcatggtttaattgcagtcttgagtacctggcgcaattgtggatacccgccataaggtctgtccaacacaggggtccgtacatcctgggcggctggagtgccggaggctattatgcctttgaagtcgcgaaacaacttatataccaaggagacatggtatcaaagctagtactgatcgacagtccctgccgtctaattttcgaggcccttcctatggaggttgtatcttatctttcttccaggaacctaatgggtaattggggagggagcaataggggaacgcccgagtggctgataaaacacttcgatgccactataaaatccgtaggaaattacacccctacaccgttggaaagctctgcgcagaccaacatgcccgaggtgtatatcttatgggctacggacggcgtactgacagacgggggcgtagaaaggtcagggttggacatgtccgtaaaagtaacaagatttctattggaccgtcccccagactttggtccccttggctgggaagaactgtttccaggaatgagattaaaaatcgccaggatccctgggaaccacttcaccatagtccacgacccatatgtaagtacagtcaacttaatacgtataactccctggtttctgagattatatatccttattggtggagcaaaattagttatgagaattacgaagatgaatgggaacattaccacgatagatgttaaaattgatggtaac

SEQ ID NO: 37 - DNA, 7164 bp, Artificial Sequence
  PKSC13A
atgtcttctgatcctcaacataggctgatgactgaggtagcgtatgaggccgttgagagcgctggcttgccgctggaaaagctgcaaggctcaaaaacgggcgtctggatgggacacttcacaagtgattacaaagagatgctttatagagatcccgacggcgcgcctccatacgcagctaccggattgcaaaaaaccagcttggccaacagaatttcatggctatgggacctaaggggaccaagcttcactcttgacacagcatgcagctccagtttggtagcgttgcacttggcttgccagtctttgaggactggggaatgtgatatggcgatagttggggggagtaacttgatgcttggacctgatgtatttatattttttgggggacaaggatttctgagtccagacggaaagagcaaatcatttgacattagcgccgatgggtatggcaggggcgaaggatttgcggcagttgtactaaagagagccgatgatgctattttagacggggatccagtaagggcggttataaggggaacggcttgcaaccaggacgggcacaccaagggtttcacattaccttcatctgaggcacagacgtcactgattaaagaagtctatgcgttagctggacttgacttccaaagaaccgggtacgtagaagcccacggcactgggacgcaagcaggggacacagaggaaaccttagccttgtcccaaacgctgtctgccagccacagtgcagctaacaagcttcttgttggcagtgttaaatcaaatatagggcacctagaagcggccgctggactggcggcagtaataaagtcagtattagtattagaacatggtatgattccgcccaacatccacttaaaaacgccgaacccgaaaataccattcgatgactggaatttgaaagttcctacaaccttgacgccgtttccaactggcaaagtcaaggatggtttaaggaggatcagtgtaaacagcttcgggtatggcgggaccaatgctcatgctatcttagatgatgccgcatcataccttaccactcgtgcagtcgccgatggtcttcattttacaaagcttgtaggcggtaggcatgaactaccgggcagaagaaacactcccaaaagtgttgtaggggagttggcctctcccaagagacttttccccataaccagtcaagaccgtaacggcctggctagggctaagaaggccttgagtctatacctgaagtcaagcggcttcgagagctggagtgacgagaaacaagcaaacttcctacaggatgtggcatttacattatcaaagaaaagatccctatttcagtggaagacctatgcgattgcatctagctctagcatccaagatttagtccaggttcttgataaaaaggatgccgctgtagcagaaactctttcttctcgtactccaaggcttggcttcgtctttacaggtcaaggagcacaatggcctgctatgggaatggagcttttcaaagcgtatgcaacgtttcgtacttctgtggaggctgcagacgcctatctaagggacgagctaggttgtgagtggtccgcgattcaagagttaagcgaaacagcaaaggaaaaatccaaaatagcgattgcagcatattcccagcccctatgcacagttttgcaagtggcacttgtggatttactgaaggagtggaatataagacctcacagtgttacgggccattcctctggtgaaattgcggcagcatactgcatgggcgcattgagtagggagtccgcttggaaggctgccttctttaggggaacactggcgacggcacttaaggagacggcacccgacattcagggagcgatgatggcattaggtcttggtccggacgccgccgcagcaatgattcttcgtgccaaggcagatgggcaggtttccgtcgcgtgtattaacagcccgtcatcagtgacaatttcaggagacgtggacggtgtagacaaggtcttagcaaagagtgaggaagaaggcgtgttcggtcgtaagctgcaagtggacacggcctatcacagtcaccacatgcaaatggtatcacaggactatatggagtccatctatgatttggaggttgagccaaccgcttccaagagcaccgttagaatgcataccagtgtaacgggatctgccgtggaaacaccagaagacctggggccagcacattgggtaaagaacttattcgcggccgcaatacaagatttagtaagaccattagctacggagtctagcaaaagacgtagagagaacgctgtcgacatattgctagaaattggaccccatagcgcgcttcagggaccctcattgcaaagcctgaaggccattggagtcagcaatatcccatacttctccgtcctgtcccgtaaccagaatggggtagacacggcgttaggattggctggaacattgtttagtcatggctatcctgtaaatctagcgtttaactatcaaaatattatcagcgggaggacacctagaactttggtgcatttaccaagttatcaatggaaccatacgcaaaaatattgggctgagtccagagtcgcgagggagttcagattaagggactacggggctaggagcctaataggtgccccatgcccggttaagtccactcaagagcacctttggagggggttcctgcgtttggatgagcaaccgtgggtacgtgaccataaaattaatggcagtattctatatcccggtgctgggttcctagcaatggcagtagaaggagcgaggcagctggcatttcaacaagatctaaataaacaaaggccaattgcaggtttcagactgagagatgtgcagttggtcgctgcgatgctgccgcaatcagaagacggctggtatcgtttcacagtcgcaagcagcgtagacggccaacccttaacgagaaactgcacaggcttagttcttgtcgaatatgaagatacgcaggcagcagactctgggatgccactagaggagcaagagatagtggacagttttagggctgctgtgtcctcctgcgataatccggtagatgcgagtcagttctacaaaaaactagagggaatcggttttcagtacggcccttgcttcgcgaatgtcacggctctttctagctgcaccaacacggctgtaggatgcatcgccgttcccgatgtcggttttactgcatcagacaccgaggtcgggcctaaagacctttaccacaatagaccccatattgtgcaccccacctttctggacgccgtttttcatctaggatttgcggcgctgatgggcaatgggaaagatatgacttctgccatggttccaacgcagattgatgaaatatttctgagcaccaacctaccagtagcttccggtacacacttgaaaggcttttgtagggcaaagaaagcaggattaaagacattcaaagctgaaatggcgattatggatgagcaggagtccaaactaggtctaacgattaaaggtttctattgcagccaggttgagggttccccctccaaagcttctggttctgctgggaccgccgtaacaaaaaaatacgcgagccaaatggtgtggagaccacatttaggattactaagtagtcatgatcttaagcaatggatacaaaggaaaacaaaatccgtggatgaagttgtcgctgagtatatcaaacttttgcatcacatcaaccccagtatgtctgttttagaattcactccggctgagatgcccaagttactaatagcaagcctggtcagcttaggtatggaagcggtgctgaataccgcccattacaccgtgtattccatgaataacgcggccgctgatgaagtcaaaacacttcttctacagtctttaccggtcgggttcagcgatcttgtcaacgtcgcggtccttgatttcttttctagtagttcagcagcaactttcgacagcacagtatcaagggctgccgatctaatcatggctagcaacctaagcaagatagagacaggtaacgtcaagtctgccctggaaacgagcatgtctagactaacggctaaagggaggttattgttgattgaagatgatgctgagaatgcattcaaggtcatcgagacagctaagcaacttggtctaacagtagaagcaaaattagaggccgtgaccggtgtcgttctggtattcagtacgtcagacgaggccagcaggcagcaaagtaacagcgaaatcacgattggcaagcctgttaccgtcctggtcccccctaatgcgagcgagacggccacatcattttttgataccctgagcaccgggcttgtatctgccggcttctttccttccttagtcacctgggaccccgccgaagctcttgcgcttcaggggaaaacaatcatatccatgatcgagctagaagcccccttttggcaggacctagtaaccgctcccgatagttctggggagtccgcattcactgcggcaagagactttgttctttctgcggaacacgtattctgggtcacgggatttaatgatccagcagcggagatggtaagtgggatcgccagggtcgtgagaaacgaagtacctggtctttcttttcgtacactaaacgtatatgacagcctttctgcatacgctgcccaactagtagcacaaacgtttgcagggtttgagctaaagtctctagacgatacagaattcaagcttgaagatggtgtcgttcaggtgaatagattagttgtggatggtgtgatcaatgatgaaatggataaattagttaacgccggaacggcggcggcaaagagacccacaggtaaaattgccctaggaagtgttgatgcaacgagctcactgaggttggctatagaggtcgccggtgaccttgacagtttgcattttattgagcagcaagcccccacagaacatggcgctggcttagagctggcggaggacgaggtcgagattagcattaaagcctctagggttagccagattgatcttgcaaccgtgaagggccaaacgcgtagtgacccgtccgcattggggatggaagcctcaggtgtagtgacccgtatcgggtccaaggatggaacgcgtaaattcaaccaaggtgatagagtaatggtaatggcgccaggggcacacggcacactgttgcgtactaaggcagactacgtaggcatcttgccggatgatatgtctttcgaggaggcggcgtccatccccattgcccttgccactgcctggtatgccctagtacacttagccaggttaaattcctccaaggatagcttgatccctaagacgctattgatacacgacgcacttagcaccgtcggacagcaagcacttcatcttgccaagcacctgggtttggtggtaatcgcgactgttgatagctattcacaggctgatattcttgcgaacagttacggcgttgagccgtcaaacatcgtgacaatttcaagcacgaatgtgttctccctggcaaaggtgattaaaaagttgacaccaagggggagaggcgtcgatgttgcaattgactgcagtgatacattagctggcgaaaggctgcgtcaaaccgttgattcattggcgtccttcgggcacttcattagatgcgtcgtcggtgggttcgcgacggccacgttagcgggaataccagccagcaacctttcagcaaatacgaccatctctactgtggatattcccagcttgattcaatccagaccagacttgctgacagagatactgctaagtgcctttagatttctgcatgagggcaagaaccagtttcttggcccggtcaggtgttttagtgcgggtagtgtcggcgcagcatttagacaagtcgagtccaatccccaggaaacgaccatattgacctacagcgcaaacgacatagttccggcaaaagtcgtagtgaggccccttgatcccagtacctcctcatcactgagggtcactttagatagtgaagccatatatgttctttgtgggggactgggaggtttgggtaggagtctatctacgctactaattaaccagttgggcgccaggaaactactattcctttcccgtagtggtgccgcagcgcccagtgctcgtcaactattggctgatctggagacgtccgcggctcaaccgagagttgccgcttactcctgtgacgtatccgacaggatctccctggagcgtgcgatcgcgagagcagagatagagctggaaggcaaggttaagggagtcatccaatgtgccatggttttgagagatgtactgtggtccaacatgagctataaccagtgggtagaaagtacattgcccaaggttcaagggacaagtaatttgagcgcagtattgccagacgtggactttttcgtaagcctgtcaagcttcgcaggagtgtttgggaatagggggcaagctaattatgcggcaggaaattgttatcaggatgcactggccagataccgtaggagaaccttaggcctaaaagcaggattcaccattgatgtcccaataatgcgtggaatcggggtgttagccgagaccggaatgcttgacagccttagggactgggaaattccatatggtatcggagaggcagagtttcatcacattatgcaacttgcgatccgtagggagatgaacttggaacctgaccagtctagctaccaaatgatcctaggaatagctacgggagcttctgcgagggaggcggggatcccaactccgttctacctaaaagacgagtcaaagttctccatcatggacagaaccgatttaagatacttaaagggtttctccgaggatagcgtagcacctagcgaccaagctggtgagcagcaagaaagcattcaaatggtgttggcgagggtcacggacctagacgaagcgtctgaggcaattacgcaggcccttgtatctcgtgttgctaagatgcaacaggttgccttggaagaaatcgaccctagccgtttcctacacagctatggagtcgactcattggtagcaatcgaaattgtaaattgggctcttaaggaaatcaagtccaaaattaacgtgttcgacgtgatggcgggtattccgattacggccctggccgagaacattgcccgtaagagcgaccttataccaaaagaggtaagggaggat

SEQ ID NO: 38 - DNA, 4863 bp, Artificial Sequence
  PKSC13B
atgagttccgccgcgtctccagctaaggggccctctgcagcgtttttttgcccggtgccgtttctagtggacaaaaactacttaactcagttgcgtagaaggattgtgggcagttcctttctaaaaccactagcagatgctatccaggaaaccccggaaatctggaaacagttatcaggggatccgcgtgcgcagcacgtggctttcggcccgcgtggagaggactttgcaagagcatttggggagtggattgcaactggggagacagggttaattgcaagtcagccttctactgtagtgtcctttccattgttgatactaactggtctatgccaatggtgtagctacctagagcttagcgggcaaacccaagcagaggtccttgcagctttaggtagtggcggcgtgcagggatactgcggcggcatgctgagcactatagctgtggcttcttctgccacggaagaagaactgggccacagagcggcgaatttttacagggctgcctttctgttgggggtgtttatgagcgagggtgaagtgggaccgcctgaaaattccccggacatgttaatcgtaaggctaaagcaccctggccaagatctacaacttatggaacaattccccggtatatacgcgtcagccacgactaacccagttacaatctgctttgcgggtaggaagtccgagttggcaccattgaaggaatacgtcgcgagcaacagcatgtttagcatacagacataccccaccggaacaggacacgacccaagaaacgctcgttacttagatgacatgctagcgatagttgctgagaacaaatcctttcacttgcctggtgctgatgcgctgaaggtaccagtgcaatctaattgggatggggaattgcttttgaaggaaactccagcggagctagcgcgtaatgtgctaggtaatgtactttgtggccgttgtgaatggtacaccgtagtcgagaaagtcgcgaagagaatcagggagacatctgaagaatcaacagcgagcctgaagatcgctaaaattgaccttgtattaactcttagagaattacaacaaaccagaagtgaactaagttcctacaacgatgacgctgtcgtagttgtcggaaccgcgtgcagactaccaggcgctaataatcttgacgaactgtggcaggtgctagaaaaaggcatatcaaaatgtgaggaattacgtccagacagagtccccctttccaggtctcatagagcttctttagacccgaagtttacaggcggacgtaagtggtttgggaattttgtagacgacgtggatcaattcgataatgagctatttggattgagtcattctgaagccgcttggatggacccccagcagagaatacttctagagctggcatacgaggcacttgatagctacggacatctaggtcacagatcatattctagggaggcagctcatgacgtcgcttgctttatcggtggaaccctgatagagtacaatgaacataccagcactcatgggcctaccgcctacagtgctatcggaactatgcaggcgtttcaatgcggtaggatctctcaccacttcggctggtacggaccatcagagacgatcgatacggcttgtagtagtagcctagtagctatctccagagctgtggcagctctaaaagctggggattgcagcatggctgtggctggaggtgccaacattctgggaggggttaactactaccttgacctagcaaaagctagattcttatctccgaccggccagtgcaaaccttttgatgtaaccgcggacggatattgtagggccgacggggctggtcttgtcgtcctaaaaagactgaaggacgcaatctcctcaggggacgaaatcttagccgtgatacctgcggccggcactaatcagggcgggttgtcaaagagtattactcagcctgacggaaaggcccagaggaaactatataaaagaattgtacaatcagctgggttaacccccaaggatatctcttatattgaatgtcatggcacgggcacccaagccggtgatcccaacgagataggtgcgctgagggatgttttcggtgacagcgacagggagaagaaactatttgtaggctctgtgaaaggaaatataggacatgccgaagcggctgccggtgtcacgggattgatgaaggtgctagcaatgcttagagaagcgaaggtccccccgcaagcgtgtttcgataaattaaacccggctattgggccgcttgaatccttcaacatgttaatcccgagtggagcagcacagccttgggacgcatcaggaaatgtgcgtagggcccttgtgaacagttacggggccgccggctctaacgcctccttggtcgtctgccaatcaccgtcacgtcgtccgaaatccgcctggtggctggaccaacgtaagagagacaaggatggagtgacggcgacctggcctctgttggtcacggcggctacgaaggcctcactggctgcgaattgtagagcgttggcggatatggtaaggagcgacaagccggacatatctaggttgttgtggacattatcagagaaacgtcaacgtcataggtttcgtgccgtattgtccgtgcccaacaatgaggtccccgatgcattggctgcggctctagagcaggctgcaagcctgccggcacaggcgccaccgaaatacaagcacgttgttatggtttttgggggacagtcccaacgtagcgtccatcttgatcgtcacctgtatgagtcatgccctcagcttcaactgcatctgagcgagtgcgacgctatcttgaaagaattgggctatccgcccgttgtggatgatattttgaatcaggataaggttgagcaagacgtcctacttctacaaaccggaacttttgccattcagtatagttgtgcgaagacatgggaagatgccggccttcacgttgaggctgtagtgggccatagttttggcgagttaactgcgttagcattttccggagctttaagcctaagggatgggatcagggttgtcgcggagagagcctctcttatgcaaaccgcttggggtgtagaaaaaggcaagatgttggcggttcatgcacctttagaaacagtaaaagcggtggcgaaagctgtggacggtttagagatagcttgccacaattctgctgcatcacatgtagtcgtcggtacatctaggcagatcgaacaggctgaggcggtagtcgctgcccaatttaagggaattaggtgccagcaagtcgatgtcactcacggtttccactccaaattcgttgacgatttattaccggggttacagaagttagacgagtccctgacgttccaaaaaccgaggatgcgtttagagttatgtttgccagaaagacatgacgccgagcccttgcaaggtcatatcgctcgtcacgctaggaatcccgttttttttgaggatgccgttgctagactggccgaagaccttggacccagtgtttggttagaggcagggactgattctccaataatcccaatggctaagagggctgtggcggatgcgggtacacactcatttcacccgataaacttcaaaagtgctaggaaaccggagacagtgatatgtgacatcacaattagcctatggagagcgggagtagatactacctactggccgtgggtaggtgccactggaatagaagctgtaaggcttcctgtatatcaattctcccgtaattcattttggacccaatgggtagaccatccggcggaacttcagacaaggttagacgaggcactgagtcaccagaaggagcaactgacattacaggctactactccccagtccctaaaactggtgtccctgtcacagacacattccaatcgtttccacgtgaatgtcaacagttctcgtttccagcagctagttagaggccataccgtttgcgagcagcctatgtgtcctgcctcaatgtatatggagtgcgtagccgccgctatagagatctatgaactaaacgaaaaaagaacctttccatcacccggagtagcgctgcaatttggtgggttggcatttaaccatccgctgacgcttagtcccggccttcaagtaagtgtcgtgcttgatattgaacatggtaacgggaggtcttggaccttttctatagagagcacgagaggcaaaaaatcagatcgtcctaccgtgcacgtgcgtggacttgtagcagtggtgccgagcccggacatgagacacgttaaagccctactgggggaccgtataacccagttaaaggcgcatccggaggctgaaaccattctaagcaggagggtatatacgctttttgggactgttgtcgattacagttctgtgctgaggggtatcgaaagcttgacgctgcacgggaattgggctgtcggcaccgttaagtaccctaagcagttggttgcccttcatgaaaccgaatcatccgtcttagatttagccgacgccgcaatcgctgataacttcgtccaggtgctgggccttgcgattaatactagcgagcacgtctcaccgggctccgccttcctggttagctctatagattcatttacattcagttccggatgtcatcttctaaacaaccccggatcatggactgtaactacgcattataacgctgagaaaaatgcgaaaactatcacaggcgatatatacgtgacagatgagaatggtgacgtcgtggcctctgtccttggtgtaaggttttcacttgtgcagctaggtgctttaaggcgtgtactggatgcagctgccggcggtcgtacactaaatagacgtagaattttgttaatgagattggcacattttttattc

SEQ ID NO: 39 - DNA, 1098 bp, Artificial Sequence
  PKSC13C
atgagcagtgcagctcatattgcaaaggtacttggtgtgatcgctcaagaggtccaggaacctccggaggaactgcagaacaatagcgatcttgagtttgcagacctggggatagataaattactgagcggctccatcttagggcaaattaggaagacgacaggactggaattgccttctgacctgttcgagagctgtccaaccgtgggttcactaactgaattcctagaaaatatcgatcaccactctaccagtgggagcacctctagccacaagtcagctgcagtctcaccaggccctcaggccagctctgcggctacgatagccgaccagccgttatctatacgtctgcaggggtctccaaaaaccccaaggaagactgtgtttctattgccggacggatccgggtctgcgatgagttatgccagaattccaagcttaggtcccggcatatgcttatacggattgaatagtccctttctgctggaaccagagaagtttctgcccatacccgacatcgctccgatatgggcagcggaagttagaagattacagcccaaggggccatatatcttaggaggctggtctgctggtggctattactgttttgaagtggccaagtatcttatgaacaacgagaaagaggacgacgggagaccggtcgcaatcgaaaagttaatattgattgactcaccatgccgtacgatcttcgaggcattaccgatggtcgtcgtcaatacattgagttctcaaggtctgatggggaattgggggaccaaggaagccccgaagtggcttttggatcattttgatgcgacaatcgctagagttgaggaatatcgtccttcacctctaactattgcgagccaacaacaggtcctgccaaaagtctttatcctttgggctacgaacggggtctacgcttccggcgaagctgcggcttccgggttagacatgaattccaaagttacgaaatttatgctagaggacaggatagacttcggacccaatgggtgggatatattgtttcctagaggtactcaaatagcactggcgacgacaccaggcactcactttaccctgatttttcccagaacc

SEQ ID NO: 40 - DNA, 7758 bp, Artificial Sequence
  PKSC14A
atgtcctccccgttcttgagcgactctcctcccctttctcctggcggtagttcttcagcaagtagtacggcagcctcttctactctgcaccaaacacacgcccaatcaaatgatccgatcgccatcgtcggtatttccttgaggggtccaggagatggtgccgataccgagcgtttttggcagatgttgttggatggacgttccgctagacgtgatattcccaaggacagatacaatgttgatggcttttaccacccggatggagatcgtcttggatcaatacagcagaggcaagcgcatttccttgaacaggattttaaagtattcgatgcaccgttcttttccgtcacacctaaggaagctaaagctatggaccccactcaccgtatgttactggaggcgacatatgaaggatttgaaaacgccgggatgagacttgaagatgtggccggaactaagaccagcgtctacgttggtacgtttacagcggactttccctcactgcaggcgagagataatgctggaccctccatctatcacgctacggggacttccgcttctttggcttctaacagattgtcatggttttacgatttgaagggaccttcactgacagtcgataccgcatgtagtagtagcctaacggcattccacttggggtgccaaagtcttagaactggggaggctagcatgtccgtgatagcaggcgccaacctgatgtttggaccggacatgtcaattcttctaggggcggcaaagattttgtcacccgaggggagatcaaaaatgtgggatgctagtgcagatggtttcgcgaggggggagggtataggggtccttgtgttaaaacctttgtccgccgccctaagagatggggacaccgtgcgtgctgtcgtattggcaagcgccaccaatgaagacgggtatactccggggatatcactaccaaactctgaagcgcagcaagagttgatccgtgatgcgtatgcgatggctggtgttgatccggccgacactgggtacgtagaagcacatggtacaggcactcaggctggggatccgctagaagctagggccataattcgtaccattggtgcggccggacgtaggagggctgatttatacgttggctccgtgaagacaaatatcggccacttagaaggagccgcgggggttgctggggtgattaaggctgcattagccgttgagcgtggtctgatcccccgtaatctttggttcgacaagctaaattctcaaatcaagttaccctctaacgtcaagattcctgtagaaacaactgtatggcctagcagcggaccaaggagggcatcagttaattcctttgggtttggtggcgcgaacgcacatgtcatactggaggacgcagcatcttattttgcacgtaccggacagtctgggagacattttacggcaggtgccgcgaaggcattgctatccgagcagtattctgactcagacgtatctagcggttcagatagtgagaccagctgtaacaatgggaacggtaactcaaattcaaaaagcaattctaaaaccaccagtaagacctccacacctaaaattttggtcgtcagttctaatgaccaagacggtgtcaaaaggaacgtcgaaacgatcaagtcctaccttagcagcaagccccaaacggacttagcggatttggcctacacgcttaactctaaaaggacaacctttccgtggaaaagtttcgccatagccagggatctagaatccgccccagacggattggacacaatgccagcagcggtcaggagttcaaacgcgagcgtcccacgtgtggcatttgcatttacaggccaaggcgcccaatggcatgctatgggccgtggcctttcagtgtacaagacatggagagactcaatggccgtctcacaacaggtacttactagccttggatgcccgtggagtcttggggaagagctgtctagaggagaaaaggacacaaggctgcgtttgacagaatattctcaaccgatttgcacagccttacagatcgcactagttgatttacttaggagctgggccgtagaaccagtggcagtggtcggacatagcagtggggaaatagcagccgcgtacaccgctggtttcttaagtcatgaaagtgctgttaaagtagcttggcttaggggccaagttagcggcactgtctctcgtgatggaggtatgcttgccgtgaacgcaccagcagaggctatgcaggcgagattgggtaagctaacaacgggccgtgccgtcgtagcgtgcatgaacagtcctagggcctgtacaatatccggagaccgtgctgcagtggatgagttacatgagctgttaaaagcagacgaggtcgtatgcactaaacttcccatggacgttgcgtaccattccttccacatggaggccgcgcgtgaacaatatgagcaagcgttggcaggaataccacacttgcgtcccaagtcaggtccaactatgttcagtagtgttacaggagagttagtgggcgcggacgcgatgtcccccagttactgggtagataatctagtaagtccagtgaattttactgcagcaagtaggtccttactacaccattcacctgctaaaactagaactgataggtctgcgttcgcatcagtactggtcgaaatcggaccacacagtgctcttagatcctatctacttgatgtttttaaggccgaagatcgtttaaccgacctgtcttacgtcggagttttgagaaggaaaatggacgctgtggacaccgcgcttcaggccgctggcgagttgtgggccaagggctgtgcaatagacgtcgacagggtaaacgggacagctcctagtgaggcaaaaatgctggtggatcttcccccttatcgttggaatcatacgaagagcttctgggaggaaagccatttgtcaaggcaatacagattacgtgcttcaccgaggacggaccttcttggataccgtgttcctggagtcccagatccgactttcaggaacttccttaggtgcacagagaatccatggatacgtgagcacagagtccagggggacgttctgtatcctggagtgggcatggtggtcatggcggttgaggcagcaagggctgttgctgacgttaatgaagaggtcttgggctacgaactgagggacgtcggaataagtaccgctcttagagtacccgatgatgaggcaggtgtcgaagtaatgacccagttgcacgcgcgtaggacgggcactaaagccgaaccaagcaacgcactttacgagttcgcagtgagcagttggtctgacgatgcggaacaatggacggttcatgctagggggctggtttcattgacttatcgtagttctttgaccccggccatgcagggtgaactggaaagagagtgccaggcgcgtggcagagaattcgaagtggccaaggctacgtgccagagaccggcacgttcctttctgtatgaccaggtcgaggccatcggaatggtctatggacccacatttaggaatatgactgagttatatgcaggcccggatgcaaactcttacggagttataggcataccggacaccaaaaaaattatgcccaaagggtttgaatatccgtttgttgttcatccagccacattcgatagtgtgttgcatttactgtttccgtgcatcgcgggcgaggaggagtctctgagtgaagctgtagtcccgtttagcttcgacagaatctttatttcagctaagatgccaacggaagcaggcactaagctacaaggccattgctctgcaagaaaactgagctacacaacttggacgtcaggcattacggtttgcggggaacaacttgacgagccactgataatcatggaggggctgggcctagcgagtattggaggttctggatccgaagagaatgcgaaggagtccagagccggttgttttggtcaaaattggcatgaagatgttgaccttttatctcctgcgcagataaaggagctagtgtatcacaggactttaaaatctaaggatgacgatacggtgctagataagctagaatatgtatgcttagtgtacatagctaggtgcctggcttggttggaaactgaagaaggcagacctcacatgcccactagcggcttctggaagctatatgtggaatggatgcatgacacggtggcggctttcccaccgctggctagagatcccgccgaagttgaagctgaattgcaaagatgcaaagaggctatcgtccactctccaagtggagatattacagtgcaaatggttgaacgtattggggtatctcttccagctatcttcagacgtgaggttgagccgcttcaggttatgaccgaaggggatttattgtacacattctatagaggggctttcggaacttcattcaacacaaacgttgcggagtacgtgggattgatcgcagataaaagccctggccttcatatcttagaaattggggcaggcacaggaggcactacctatcacgttttagagagactaagaaatcctgatggcacatccaaagcagcgcgttactttttcagcgatatatcccctggcttcttagctaaagctgcagataggttccagactgatgcttctgtcatggaattcggcacctgtaacattgagaatgacccgctgacacaaggcttcgcacccgagagctttgacttaatagtttgtgccaatgtacttcacgctacaaaatctatacaggagactttgactcattgtagagcactattgaagccaggagggaggctagtacttagtgaggttacaattaaaagaattttctcaggcttcattatgggaccccttcccggatggtggcttggtgaggacgatggtagacatgggggaccccttttagatgtgccggaatgggaaacggcactaactaaggctgggtttagcggcgttgacatggacgtgcgtggcgatcgtgaagagagcctggagccggtgagtttgatcataagcacaaagcctctgaccaaaagaattgcagcagcggatgaattcgtagtagtgacacctgcactagcagagtctcaaaaacttgctcaggcaatcgtcgacacgatcaaaagtgcgggaaagaaatgtacaagcttggcgtgggaagatgtcacgaaggaagctgtccaagggcaatactgtatatgcttagctgagtgggaaagtccgatactggtggatcttacggatgagaactgggctcgtcttcgtgacgtcgttttgggctccgccggtaccgtttgggttaccgggggagcagccatggacactccggaaccgctaaagtctctgatggtcggtcttgctcgtgctatacgtaatgaaaacgctggagttttacttgcgaccttagacctagaaaccgccgctaccatcgatatgaggcaaggatgtgatgcggtcttaaaggtcgccttagaacactcaaggggcgagaccccggatggcgaattcgcagcgcgtaggggtcgtgtttttgtccctcgtgtggaacgtttgcctggggtcgatgctagtttaagaaaatatgagaacaagggtgatccagaaccagtatcttttgttgggtgtgggagacctctgaagttgacaattaagacccctggtctgctagacacttttcgttgggtcgaagatgaaacgtatcatacccccgtgccggaggattgggttgaaatccaagtcaaagcagtggggctgaatttcaaagatgtattagtagcgcttggcaacctggccgagtacaagcttggcgtagatgtgagcggtgtcgtaacaagagtaggggccggtgtaaaagatttgaagccgggggacaaagttatgacggcgtcttgtgatacgttcgcaacattcgttaggtttcctgcgaagggcgcaattccgatcccagatgatatgacattcgaggaagccgcctcaatgccattgatttttctaacggcttattacgctctagtcactgcagggcatctggtcgcaggtgaaagaatcctaattcacgctgctgctggaggcgttggccaagcggctatacagattgcccaaagcattggggcggagatatttgctacagttggatctgatgagaagaaacagttgatcatggatcagtatggcataccggcggatcacatcttttcaagtcgtgacacgtctttctataaaggggtgatgagagcaacggacaaacaaggtgtagacgttgtgttgaacagcttagccggggaggcgcttaggctgagctggcattcattggcgaaattcggccgttttttagaaattggaaaagcagatttatttgcaaatacggggcttgacatgcaacctttcctggataacaaatcatatataggtgtgaatttgttggactttgagaacaacccaactcccagagccgtcgcactatggagggaaaccgctgctttaattcacgacggtggagtgcgtccggtgcatccattgcaaagattcacgatggctgatgtggagaaggcatttcgttacatgcagacggggaaacacactgggaaggtagttgtgtgtgtggatgaagcggacgtagttcctgctattccgaggacaccgaaagtccccatagtagctgacgctacttatgtggtggcaggtttgggcggtatctgcagagaaataggccgttggcttgccgaaaagggagctaaacacctggtgtttttgtctaggaccgcagcgtcttctgcggaaaataaagaattctctgctggcctagagaagacctacgacacgaagatacacgcgttcgactgcgatgttggggataagacagctcttgccggagtattggaggccataggtcacttaccaaaggtcagagggtgcgtcactggagctatggttttacatgatactcttttcgattctatgaccgcagaccatgtaagaaccacagtcggtcccaaggtacacggtacatggaatttgcatgagcaattgccggcagatctagactttttcgtaatgctttcttccttggccggggtcatgggccaccgtgggcaaggaaactatggttgcggaaacatatttcaagactatgttgcggcacaccgtcgtggcctagggcgtagggcaacgaccgtcgacataggatacttgttgtccgtgggatttgtagccgagcacgatgagtacgtggaccacgttaaggctatgggtctaaaagtcatgagaagctctgatctgcacgggcttctagcaactgccatggaagcagatttggacgcgagtccagcccaagttatgtgtgggttaccctaccgtgagcatgacgatgcatggtactggattagagatggaaggttcgctgctctgcgtaacgtgggagccgccggagccgcagctgggtcagggggcggtataagtttaagggaagagctggccaggtgtggccctggtgatgacgaagctgcagtggacctgatcacaagagcattagtacagaggcttgcaaaacttatgatgatgcctgaggcggacatcgatgcaggacgtcctttgtctgcctacggggttgactctttggtagcagttgaggttagaaactgggtgagtaaggaggttgtagtggaagtctccgttttcgaccttatggcaaatgttcctatgcgtgtgttagctgccaacttggccaaaaagagtgccctgttgtccgacaaagcc

SEQ ID NO: 41 - DNA, 6549 bp, Artificial Sequence
  PKSC14B
atgtcttcactaaccaccatcaaaatggcggataagctggcgttcctattgttcggcgatcaatcacttgatactcacgggtttctggccgaattttatagacatgaagacaggggaatattagcaaaagcttttttggaccaggcggcacaggccttgcgtaaggagatcgaaaggttgccgaggctagaacgttctcgtcttccggtattccgtaccctgcaacagctgaatgaacgttaccatgcccaaataaccaaacatagtggtttagacggggcactgctttgcgtcgcacaattggctcactatatcgatcacgctgagaagaatcatgaagacgtcacccaacatgataaaacctacttggtgggattgtgctcagggttattcgccgcgagcgccatagcatccacccctagtttgtctagtttggttcctgtcgctgtccagaccgtgctaatggcatttcgtacgggggctcacgttgccgctctagcagaacgtcttgaacccgtatctgaaaggagtgaaagttggacctacattgtacctggtttcacagaggaagcagcccagaaggaaatcgctggcttccacgagtctcacggaattccacaagcctctcaggtatacgtctccgcttccagttccgctaacgtagcgatctcaggtcccccgacgacgctaaaggctttccgtgccgccactagttccttaactaaagcaaccgccatccctgtttacggcccttaccatgccccgcacctacatagacccgaagatgtggacaatatactgggattgaacaatccggagatgatcgacacctttcttaatacaaagcctagatcttctgtgatgagctgcttgacgggcacgtggttcaatgagtctacaacgcgtgcgctgtttgcagccgtcgtatcagaaatactaacccaaacactgaggttccataacgtattagatggctgcttgaacctggctagggggttcgatggcaaaagctgtctgatcatacccttcggccctacccaacatgcggccacgcttgctaaccttttaaaggccgaaaccaatctagatataatcctaaggaaagctccgcaaataagtaaggagagcacggactctgtgattggtaatcatggacgtggctcacgtgataagttagcgatagtcgggatggctgggcgttttcctgacgctgcatctcacgaaaagctttgggaactactatccaaaggattggatgttcacagagtcgtgccagctgacagattcccagtagagacgcattacgacccaaatgggaaagtgattaattctagtcacacgccttacggttgctggatcgagaagccagggatgtttgatcctcgtttcttcaatatgtcaccacgtgaggcttttcaaacggatcccatgcaaagaatggctttaacaacagcctatgaggctctagagatgtctggttacgtgccaaatcgtacgccatccaccaggttagacagaattggtacattttatggccagacctctgatgattggagagagatcaatgccgctcaggaggtcgatacttattatattacagggggggtacgtgctttcggaccagggcgtattaattatcatttaggcttcagtggtccttctctaaatgtggatacagcgtgcagttcttctgcggcagctatgaacgtcgcatgtagcagcctatgggcaagggattgcgacacggccattgtcggtggcttatcctgcatgacaaaccccgatatattcgccggactgtctaggggccaatttctatcaaagaagggcccatgcgcaacgtttgacaataacgccgacggctactgtagaggcgactcctgtgcatctgttatcgtgaaaaggttggatgatgcgatcgcggatcacgacagggttttggcggtcatactaggtacggccacaaatcatagtgccgacgctatttctataacccatccccatggaccaacgcagagccttctgtcctcagcaatactagacgacgcgggggtagatccgttagacgtcgactatgtggaaatgcacggtactggaacacaggccggagatggcacggaaatggtaagcgtgaccaatgttttcgcaccagctaacaggaaaagacccgctgatagaccgctttacttgggagctgttaaagcgaatttagggcatggggaggcggccagcggagttactgccctatgcaaggttttacttatgttacaaaaaaacgcaatccctcctcacgtcggcataaaaaaaggatctgtcatcaacaagacattccccaaggatttgggtgaaagaaatgtcaacatagctttccatctgacgccgttcaagaggtctgatgggaagccgaggagagtctttattaataatttcagcgcagccgggggtaacactggtttattgctggaggatgcccctccagtcgagccagctacgcaagatccgagaaatgtacatgtaatcactataaccggaaagagtaaaagcgccatgatacacaacgcagaacgtctgatccagtttatggatgataacgacgatactccgatatctcatgttgcatattctacaacagcccgtaggatccagcattattggagaatgaacgtgaccgcacaggatttaggggaggctaagcaggctcttaaaaataggcttcaagaaaattttgtacctgtttctccagagcctcctaaagttgcattcatgtttactgggcagggcagccactatgctgggctgggcaaggaattatacgcaaatcatgctgtatttagacaagcaataaacgaatttgacaggatatcccagattcatggcttcccgtcattcatgcccctagttgatggttcagaaccggatgtggcaaagctagaaccccttatagttcaattaggattgtgttgctttgaaatggctctggcaaaactttgggcctcatggggtgttaaacctgctgcagtgatgggtcacagcttgggagaatacgccgctctacacatagctggcgttctttctgctagcgacacaatatatctggtgggggccagggctaagttgctggtcgagaaatgtacagctggcacgcacgcgatgctggctgtgatgggcagtgtctccactgtacaagaagcactaggtgaaagggccgattccacaaatgtggcttgtattaacggaccgagggaaaccgtcctgtcaggggaggctagcgagatggcagaaatagcgcagcagctgggagccgcgggtttcaaatgtacccaactaaaggtaccatttgcatttcatagtgcccaggttgatcctatacttgacgacttcgaaaaattagcaagaagtgtgagattcaacacgccaaaggtgcccgtcatatcccctctactgggcaagttagttgatgacgaacctataaacccaaaatatttacgtgatcatgccagagatgctgtagatttcctagggggactagttagtgctcaatccgctggcgcaatcgatgagaaaaccgtgtggctagaggtgggtccccacccagtatgcgctaatatggtgaaggccgccttcggagtgtcaacggtcgcggtgcctaccctaaggaggaacgaagccacatacaagacgcttagtgcgagcttgtgtacactgcatacagccgggttgaacattgactggaacgaatatcacaacgacttcttaagttctgtgagacacttagatcttccgagttacgcattcgatgagaaaaattactggttgcagtatgagggggattggtgcctaagcaagaaccgtattgccaaagctttaccggccgctgcagctgttgctaaacctaagttagaaactacgacagttcagaaggtcgtcagagaggagataaagggcgatgtggctgtcgtcgagatagagtctaatcttagcagggaagacctacgtggggtcgttagcggtcaccttgtcaacggtgcgccattatgcccttcctccttgtatggtgatatggccatcacaacctgtcaatacgcttataagctacttagacctgagagtgaaaatataggggtcaacgtggcccacatggaagtcccgaagacactaatctttgacgatgccgcagaatcacacatccttagacttaccgtaactgccaacgctgcgcagaattctgcggacctggtattccatacaggtgaaggagctaagcgtgtagatcatgccaattgtaaagtatatttcgggaatacggaagactggcagggcgagttcgatcgtgtcagttacttaattaaaagtagagtagatgggcttatagattccgaaaaggacgggaaagcgtctaagattggtcgtggcttggcctacaaattgtttgcggcgctagtggactacactccacgttataggggcatggaggaagtagtcctggatagcgaaacttgtgaggcaactgctcaagtaaaattccagaccacagaggcagatggcaactacgtatttagcccgtactggatcgattccttatgtcacatatctggattcataatcaatgggacggacgcagtcgattcccgtgagcaggtgttcatctcacacggatggggttccttacgttttagcgaattaccagtggcctccaaaaaatacagatcttacatccgtatgcagcccattaagggaaacaaagtatatgccggggacgtatatgtttttgacggcgagaagattattggaatgtgtggcgacttgaaattccaagccataccgcgtaaggttcttaacatgatgctaccccctcgtggggccgccgccatcgcagcaccggctagggcagcaccagccccggcggcaaaacccgcagctaaagagaagaaaacatctagtaccaaagagaaatctaaatccgttactcccaagaacattgggaaggttaatcagaagttggcttccgttgtcactcaggtactagacatcttggcaaaagaggttggcgttagccatgatgaactggccgacaacattgcttttacggacctaggggtcgatagtttaatgtcattaactgtatctggtaggataagagaagacatggacttatccatagacagtcatgcgtttgtagaccaccctaccattggagcatttaaagcgttccttgcccaatttgaaggtcccggaggagccatggaggacagctcaagctcctcctcatccgtcagtggggatatggattcagaaagcgatgtgactaccccggctgacgaatcagataccgcctccgttaagggtgaaaagatggacggaaaggccacggctaccgacacgaatgagttgcaggaggcaattcgtaacacgatcgcgaccgagatggggatggacgtggaggagattattgccgccccagacttagcttctctaggtatggactctcttatgagtttgcaaatcttgggaactttgcgtgaaaagaccggcatggatgtgcctagtgacctattcgtttccaacccgtcccttaaagatgtagagcgtgcacttgggatcgtacccgcggcgccgaagcgtccggcggcgcaaaccgctcctgccaaatcaaaagcgtccaagtccgaaaaggtaaagccctgtcctccgactacttccataccaccgagccaggtaacggcaaccatctataaaccgccacgtccgacggaaattctggatacaatgccccatagaaaagctaccagtgttctactacatgggtcacacaaaaccgccacgagacacctttttatggtacccgacggatccggatgtgctacttcttatactgagatgtgtaacgtggggcccaactacgccgtctgggggcttttctccccatttatgaaaacaccggaggagtacaattgtggggtatatggaatggctgcgaaatttattgaggaaatgaaaaggcgtcaaccagtgggaccctactccttggccggctggagtgcggggggggtcatagccttcgaaatagtcaaccaattgattaaagcaggtgatgaagttgagaatatgataataatcgacgctccatgtcccgttacaattgagcccctacccaagtcattacacgcatggttcgcatcaataggattgctgggcgatggcgacgcggataaaatcccctcttggctgttgccccatttcgctgccagtgtgaccgcactgagcaattacaccgccgaacccattcccaaggataaatgcccgaaagtaatggcgatctggtgtgaggacggagtttgtcatttgcccaccgatcctagacctgacccctatcccagcggccacgcgttgtttcttctagataatcgtgtggatttcggccctaacagatgggatgaatatcttgacggatctaagatgactatgagacacatgcccggtaatcatttttccatgatgcacggtgcaatggccaaacaacttcagggcttcatgcaggaagccctgcaa

SEQ ID NO: 42 - DNA, 1206 bp, Artificial Sequence
  PKSC14C
atgagcagtaatcttgctgctgatacctggtgcaactttgtaatccagatcaactttatactgggtcacaatatgcgtgattacactggccaggtccttagtataatcgcacgtgaagttgatgaacctccggaagagctgcaaaataatccggaattagagtttgccgatcttgggattgacaaattgttgtctaggagcataattacgcaaattcataaagcaaccgggttggagctgccggttgagctattcgaaacttgtcctaccgcgggggcgttaataagttttttaaagaataaggaattggctggaccggggaatgaagccaagccgaacgacattctacttaaccaaccgttaagcattaggattcatggtcgtccgggcgcaagtacaaagaatatatttcttttacccgatggtagtggcagcgcgatgtcttatgcgagagtgccgccactggggccaggagtgtgcctgtacggacttaattctccctttctgcttgaaccggataagttcccaagaatagaggaaatatctccgatttgggtcagcgaaatcagaaggcttcagcctaagggaccgtatattctgggaggatggtcagcaggtggctattatggcttcgaggtggcgaaatacatgatgagaaacgaaaaagaggccgatgggcaaccggttgtcatagaaaaacttatcttgatcgatagtccatgccgtgtgttgttcgaggcccttccaatgattgtagtgacaaccttggcggaccaaggcctgatgggtaatatgaaggacagagaagcaccgaagtggatgttggatcatttcaatgccactatagcccgtattgaggaatacatgccctcacctctaattttagaaagcgccagtcaagttctaccccagacattcattatctgggcaaccgattccatttattccccaggtgaagcctcagccatgggactggacacttcagtaaaagtaacgaactttatgcttgaggggcgtaccgactttggccccaatggttgggatcagctgttccccaaaggtacgttactggctgtgaccacaacgccaggtacgcacttcaccctaatgacccctcctttcagcatctctatcgcaagccgtctgaaggacattgtgttaggcaatacaaagcaggataagagactgtggaatcacagaatgtgt

SEQ ID NO: 43 - DNA, 7551 bp, Artificial Sequence
  PKSC15A
atgagtagtcaggcaccagccccctcccgtgacgacatagcagtcgttggattaagttgtagatttccgggggaggctgatacagctgagcacttctgggactttatatgtaacggtaggaatgcatactcagagaacccagaccgttggactccggatgctttccattacggggaaaaaaaaattaatacgtcattgccaaggggtgggcacttcatgaaacaggacgtcgcggcgtttgatgccaacttttttaacttaagcaaagttgaggccgagtctatggatccgcagcagcgtataataatggaggttacctacgaatcaatggagagcgcgggtttgcgtgtcgatcagcttgcgggatctcgtactggtgtgtttatggcctctttcacgtctgactacagagagatgctttacagagacgccgaaacggcccccctgtacaccgccactggtacgtcaaatacaagcacgagcaacagggtatcctggtttttcgacctaaggggccccagcttcacggtaaacaccgcatgctcatcttctttggtcgcatgccatttagcttgccagagtctgtggtccggggaaacagagagtgctattgttgggggtacatcattgctactgaaccccgatatgttcctatacttgagcaatcagcaatttctggcgccagacggccaatgcaaatcattcgacgaaagcggggatggatacgcaagaggggatgggataggagttgtaattttaaaaagggtagctgacgcgttaagagacggagaccccatcagggccgtgattagggggtccggctgcaaccaggatggacatactaaaggcttcactattccctcagtggacgcccaagcgagtttgatagcagagacctatagaaatgcaggacttagtcttgccgaaacccgttacgtcgaggctcacggaaccgggacccaagcgggggataccagagagatggagggtatagctcgtacattttctcagcatcgtacagcaagcgacgaattgcttgtgggttccgttaaagcgaacatcgggcatttagaagcctgcgcggggttggcatctctaattaaatgcgtttacattcttgaaactggagtgataccgccgactccgtcagtcagagtactaaaccctaaaatcaggtgggaagagtggcaccttaaagtacccgcgacacaaacaatctggcctacggagggtcttaggcgtataagcacccagggttttggttatgggggcacaaacgcccatctgatactagatgatgctgctcattatcttgaggctaggaaactgagggggcaccactacaccaggactcacccccagacccaaagacttttgacgtcagccatgcatgaagacgtatccaacgatcagccgccgcgtctgttcctatttcgtgcaaacgaccgtgaaggacttgggagggtaagatctagtcttgctcagcacctggagcagttgctaaaaagctggccgcaagacagtaaggacggcggggcgtacttgcataacctggcgtttactctggcgagtagacgttctcacttgcaatggcaaacctacgcgaccgcttcaacaccaagtgaactgctgcaggctctgcagcatgaaggtggggcctgggctgcacctgaaacaagattagcagccagtccccccaggttagggtttatattcacagggcagggggctcaatgggcgcgtatgggcgtagagttgatgtcctatcctgtcttccgtcaaagcgtagaagcttctgatgagttcttgcgttctgccctaggctgcccttggtcagctgtcgatgaacttgctaagccccaagcgacgtcaagactatccgaagctgcttattctcagactttgtgtactgtgctacaaatagcgacggttgatctgcttgaagattggaacgtctgtcctgcgcgtgtagcgggccatagctccggcgaaatcgcagcagcttattgcctgggggccttaacaaaacacgactcattgcgtgttgcgtattatagaggcatattgtcaagtgaaatgcagcaaacgcatggcgatcgtaggggagctatgatggcggtaggggctagtccggaagaggtcgaggcgtggctagctaagctaactagaggtagagtagtagtagcgtgtattaattcacctacctccgttactgcatccggcgacgctgcaggaatagacgagctactagctatggtccagcaagcaggagtgtttggaagaaagctgcaggtagatgtggcttaccacagccaccatatgcaaagtgtgagtagtgcatacgcggaattattaaaagatctagctccattgccagcccgtcctggccgtactatgcacagcagtgttctaggcagggtcatcgacgccgcagagttgggtgcctcaaactgggtacaaaatttagtttccccggtgcgtttttccgaagcggtaagcagtcttttgagcgcgggcgacaaacctgccgtagacgtcctggtagaaattggtcctcacgccgccctaaagggacccgtgcagcaaattctacaggcggtgggagtctcagcagtaaagtatactagcgtactaagcagggggcaaagtgcagttaagactgctttggcttgcgcaggagagcttgtattgtcaagcgtgcctgtcgcagttagtagggtcaatcttgagtctggtcccccgccaagtcccctggtcgaccttccgccttatccctggaatagatcaacacgtttttgggctgaatcccgtcttagtcgtgaatacaggttacgtaagcacgcacgtctgccattactggggtcaccctgtccgacaatgggtgctagagaaagatactggaggggcatggttcgtttggaggaggagccttggataagagatcacgagatacaaggatcaatactttaccctggggctggtttcttgataatggcaattgaggcagcgtctcagcaagcaggagaacaaagaaaagtatctgcctttaggcttagagacgtccatcttgacgctgctcttgtggtgtccgaggatagtactgcagaggctatattacagttgagaccacacttattagctccaggcagttcccagagcagttggatggagttcacggtaaactcctcaatcgacggtggcgatctgcgtcagaattgttccggcttaatcatgatagagtatgccgcagatgcggactctgcgatggacagagaaagggccttggagagtgatatggtttgcgactggtacaagaaaacatacgtttcctgccaacaaagcgtagacgttggtaagttctactcccgtttagcatcccttgggttagtttacggacctacatttgcaaacgtcaccgagatacgtcgtactggccagggtcagtgtattggcgccgtacgtattccagcggtggattcacttgtacctccggcgtaccgtagtcaccctcatgtaatacatcctggaaccctggacgccgtctttcacttggcctttgcggccttagaagacagtctgttaccggggcctatggttccaacgacaatcgacgagctggtggtcgcagcggatacgccgaacacgcccgggactctacttcgtggagtctcccgtagtagtcctcatggcttccgtgagcttatcagcgatattgatatgttggatgatcaaagtagtcgtgctctagtccaaattaaaggctttaggtgcgccgacgtgtctggcggtcgtatgacctcttcagaagcggcaagtgcggagagtagaccaattggctttcgtcttgagtggaaacccgcaattgatttgctgaccggtgaacagctaaggacacatttggacaggcgtgtcaagcaagaaggcgcgtctaatgtggcgcgtgctacagagttgaacaatcatgtgcaccatttggaggagacattgccacgtgtagcggtagatcccgcgatggctaacttaagtgattggctttctgcgaaatcagcaaagttaacgaacgggagtgccagttcaagcaagcgtcccagtcctgggggggatatgctagcaatgagagacgctcttaccgccgtccgtgctggatctatccccagtccggaacagcaggacagaatgttgagagaagttgagcagaacggagcccttagcatcttgtttaaacccttggatgcgtatatagacctacgtcaccacgccaagcccaatctgtccattctagagctaagcctagacagcgtaccctatagtgtcttcgccgcactacccagtaggcataagatattacagaccgcacagtatgcgatcagggtgtcacaggagggtgtagccgacagggtgagggcgcaattcggaccgcaagcatcagatatagatgtctcagtgaccgattttactaaaaagcttgacgaagggctgggtaaacatgacgtgatcttgatttttgacccggggtttgtacatgcgaagcttgaggtcgtgttaaggaacgccaggaagttattgaatccgggagggaggataatagttgcagaagtatcagatccaggtctgtatttaggaacggcgctgggttgtctacaatggacacgtaatctagatgtggctcaaagctcaagctcctggacgagttgtctagctagaagtggactaacccctgctttaaaattagttgacatggacacagagagcgcagttcacggacattttcgtttaagtctaaccggaaacgctgccgagtctacaaattccgacaatcgtcaaccacaacaggttactttgattgaagctgctaatgctagtgcgaccgcccagggtatcgctgcagcggtagctcaaaacttggataaagcatctattcctaccaaaagagttaggtggggctctgatgttagtcagcttaaaggtcagccctgcatagttcttacggatcttgagagcgctctgttgaaagacccggctcccgaagacctagccgctttgcaaagcctgttcgcgcatgccgagagcacactatgggtcagcggcccgctgggacctgacgcggccctgataacagggctatctagatccgtctgtaacgaggcggccgacgtgcacataagaacactggaggtaaccgatttaccgggaccggaggctgattcttacgctgacttagttacgcgtgtgttccaatatagtgggccagacacggaattccgttggcactccgatgcgcttctagtctctcgtcttgtcgaggatgaagcgaggaataaggagatagcacagctactgggacagggcgaaaaggcagccgttgcaacgaccttacaagagaaacccgagggcttgaagctttgtatgaggcaaatagggatgttggattctgtttgttttgaaccggacttattggcactggaacctcttgaggccggcgaagttgaggttgacgtcaaggctagtggcgttaacttcagggatgttatggtagccttggggcaaataccggatagggcgttcggatttgagggcgcagggatagtaagaagagtccacgcatctgagactcgtttaaggccgggcgatagagtggtcttccttgctcatggtgcccatcgtaccgtacacagagtcagggcggattacgcgatgcctatgcccgacaccatgagctttgaggagggtgcagccatattactggttcatactactgcatggtacgcgctagtgaaatccgcgcgtgccactgcaggtcagtccgtgttggtccatgcagccgccggcggagtcggtcaagctgtacttatgcttgcgaggcatctgagcttacaggtttttgctacggtcggttctgaagaaaagcgtaagctggtgcacgagacatatggagttccgcacgatcatattttcaattcccgtgatgcatctttcgcgatgggggtaaagagaatgacaaagggaagaggcgtggacatcgttgtaaatagtctagctggcgaagctcttcgtcagacctggcactgcttagcgccatttgggacgtttgtagagttggggatgaaagacatcttagacaacgcacgtttagacatgaagccattccttcaggacgccaccttcgtattcttcaaccttaaccgtgttcaaaaagagaggcctgatctgatgggcgaggcgctgagagagacaatggcactagttagatcaggagcgttaaaaccagccacgccattaaccagctaccctgccagccaggttgaagccgcgtttagaaaaatacagaccgggcaacatttgggtaagcttgtgttgacatttcaggctggcgatgttgtcccggttgttcgtcctgatctttctttatcagatagcggtacctaccttctagtgggcgggttgggcggtttaggaaggagtctagcaagattgcttgtccagttaggcgcccgtaggctgtgttttctgtccagaagcggggccgcgtctagtgaggccagggctttagttaaggaacttgagatgcagcatagagtaagggtcctagtttgtaagggagacgtctctgacgccgatacagtatctagggttgtacaacaatgcagggctgcactgggcccgattagaggagtgattcagtgtgccatggtattgcgtgatgggctgtttgaaaggatggcgcatgaccagtggacagagtccacccgtcctaaggttcaaggaacctggaacttgcatgagcaaattccggtttcagacttctttatcacccttagctcattcgcgggagtcttcggatccagagggcagagcaactacgcggctgctggggcatatgaagatgcgatggcgcaccatcgtgagtctcttggtcagcgtgcgataaccatagacttgggcatcatgagagatgtgggtgtcctggcggaaaatggtataaccgattaccttagggagtgggaggagccgtttggcattcgtgagcctgaattccacgctcttataaagtccgcgatcatgagcacgacgcagcctctgacagaacgttccgtggtgcaaatcccaacgggcttggccacggctaggagtgcccaagctgctggcatttccacaccgttctattttgacgacgcgaggttcagcatcttagcccaaacgcgtacatccgccggtgcatcatctgcagcaggttcaggagatgcggacgcaggtaaagtgtccgtgagaacacaactttcccaggcgcattcagtggctgaggcagccgctgcagtccagaccgtcctgctggagagggtagcacgtacactacagtcctccgtcgcggaaattgacccttctaggcctctgcattcatatggggtggattcactggtggcagttgaaactgtcaagtggatgtttaaaacattggatgccaagttaacagtcttcgacgttctgtcaaatgtgagtattaccgccctatgtgaaaagattgcttcaatgagcacgctagttaaactgaat

SEQ ID NO: 44 - DNA, 5151 bp, Artificial Sequence
  PKSC15B
atgagctctaagttaagggtagcgaattttcttctattcggtgatcagacagtggaaaagctacctgcaattaggcacttggtcagtcatggagccagcagtccattggtacagagatttcttagggaggtctgtgatgctgttcagttgcaagtcagcaaactgcccttacattcagagcaaagatcaaatatcggtaactttgatagcattcttaggttagcggaaaacaatgccagattagaggagcctaatgaaatcatagcgacagtactaatgaacatcgcaagacttggcgaacttattttgtacgctgaacaggaccctacggtgttggcatctaagggcaaccgtaactgcattttgggattctgtaccggagaagtcgcagcggctgtagcagcagtcgcccaggatacgaatgaattggttgaactaggtgttgaagttacccatatcatctttaggatggccagggagttgaacagacgtagcctgatggttgacagaacgaatggaccatgggctagaacaattcttggaatttctgtcgacagggttcgtgaaatacttcaagatttccacgaaaaccaatctataccacgtgctcgtcaagtatgcatcggcttcgtatcagatgggtggcttacgctgtttggaccgcccacgacacttcagcgtctattagagtggagcgctgagcttgaagatgcaccacaaatagatacagatgctagaggcggtgtacatatggaaacgcttcccgaagttgacccagataggatactaggctcctccccatggttagaccgtgcacccgtgcacacagcaacaattatatcaccgtacacttgtaaaccaaggcagcaaaaaactttgagaggcttgctggaggagataattgcggatgtgggacaaaggacgcttaatctggccaccagtatgaacgcagcactagaactagcccaggcggacaagataaggttagtgatgccgggatacacttcacacgatgtgtacttccaaaagctactacagaaaagaggtatcgagtactctgtaatgagtcatggtgatcacctgagctccggcccgtctagacaaggcagtggtttagtcgcagtagtcggcatgtccgggagatttcccggctcaggggacatcaacgccttttgggagggattgctggaaggaaagaggtatatacaggaaatccctaataccagattcgatcttgagcaatggtacgatgctacagggaaacagaaaaactcaacaatggctaggaccggggcattcctggacaagcctggtatgttcgacaacaggttgttcgacatgtcaccgagggaggcaatgcagactgacgttcagcacagacttttgatgacaaccagttatgaggcgctagaaatgtcaggctattacccggatggaacgctatcaactaataaagacagggtggcgagcttcttcggacaaacttccgacgattggcgtgaagttgtagtccaccaaggtgttgatatatacttcgcaactggctcctgcagggcatttggaccagggcgtcttcaccaccactttaagtgggggggcccctcctatagtgtggatagtgcatgttcctccagcattgctgctgtaggcctagcttgctccgccttattaggccgtgagtgcgatatggccctagcgggtggcggctcacttttgttgtcccccagccccttttctggccttagtagaggcggtttcttgtctgctcatggtggttgtcaaacttttcacgacaacgcggacggatatgtccgtggagaaggtgtgggcgtggtggtattgaaacgtttagaagatgcgctggacgaccaggataacattctgggagtagtcaggggatctggcagaaattacagtagcgacgcgtcaagtatgatgcacccatctgcaaacgcacaaaaaaaactgtactgcgatgtcttagaacagtctggtgttgacgccaatagcatcagttatgtagaaatgcacgggactgggacgcaggcgggtgactttatggaaatgagttccgtcttgtcaaccttcgctgaaaagagaggctctgacaatcccctgatcgtgggggctctaaaggccaatataggacatggcgaagctgctgctggcgtatgtgcactaattaaaaccctgatgatgttgcaaagtagacagataccgccacaacctgacttacccggcccgatcaatcataggtttcctgatctagccgctcgtaatgtctacatagcagcaagaaatatgagacttgaagcgagcccagtggccaaggggacactgcgtgtatttttgaattcatttgacgctagcggaggtaactcctgtttgcttttggaggaagctccgccccaagctgtaaaggacgccgatccgcgtggccatcatgtagtgaccttttctgcgaggtcccaaaaaagcttgatagggatcaaagagagatatcttgcgcatctgcgtcagcaccccgataccaaactagccgacttagcctattctacttccgcaaggaggatacacggtttattaagatacgcaattgcagcatcatcaatcgacgaggtcgtacaatgtctggagacggatcttgctcaaggaaagaccccgcgtcaacctcctgctacgcctactgtcgtatttacgtttactggtcaaggtgcacattacgtgggtatgggcgccaatctttgggaaacgtcagcaaccttcaggaatacgttacacgactaccaaaccatggcatctgcccaaggactgccacatttccttcaccttatcacggactcttctaccccggcacctcaatcaggccccgatactgtacaggtacagcttgcaatggtttccttagagttagcactggctaagctgtggcgttcatggggaatccagccagcaatggtgctaggccattcattaggggaatacgcggcgttatgtgtagcgggagtactatccgtatccgatactctatacctggtggcaaaacgtgcgcagattatggctggcgcgttaacaccacacgagtacgggatgttagccgtaaatttgggtgttgccgacacgcgtgaagtcttgtcctcaggacagcacacgtcttgtgctgtagcatgtataaatgcaccaaagatgacagtcgtatctggtttaagaagtaagttggacgatttacaagaccaacttaagtctgacggcacgcgttgtaccccacttagtgtaccatatggattccatagcagccaactagatcctatcttaggtcaatttgaggaagcgtgccaaggagtaactttcagcgcccctaatgtcccagtcgtaagcaccctgttggcaacaaccgtacgtgaagaggggactttcagtccggagtatctggcgcgtcaagccagggaaccagttgattttgttggggctctgggtgcagtccaagaacataagtttccatccttgacttttctggaaatcggccccgatccagtatgctccgggttggtgaatgcaacattgggcgcagatgaggcggctttacgttgcgtggcttccatgcaccgtggcaaggctaactgggcgtccatatcttgttccctgagggatttatacacagctggtgcggccatcgattggccagcccaccacagggactttaaatcctcagtaagcttgcttgacttgccaaagtatagtttcgatgagaaggaattttgggcatcctttccggacagggatttacagactatcggtgatgttgaaacaaaacaatcccagccgccagcgatagttcctagtgtccaggggtattgcacaactaccctacaaaggatcacacgtgaaactatcgaacccgatggcttgagcgtaacattctccagcgatcttgccgaccagcacttgagggctgctgttcgtggtcatgcggttgcggatgtggagatatgtagctcttcattgttgttggatatggcccttagcgctgcccagtacgcatatatgaagcacagcccgggacagaaaatgcctgtacccctgacggtaagaaactgctatttccataggggggtcgtgctaacagacaaggcgcaaacagtcgaagttacagtaacattgacgtccagcgcgaagacagcagacatcagataccactgcagaacgccggatgagtattatgaagtgggggcatgtcaagtcgtccttaagcctgcctccaagcccgaccaagccggtttcttagtgcgtagccgtatggctgctctaaaagcgagtgcatcacacagacttggcaggagggctgtttaccgtctttttgataatgtggtgaggtactccgagcagtaccaaggtctagaaaatgttcacctaagcgaggatatgcaagatgcagtggctgagatcaatatggcgcatgtaccggcggcaggcgggcattatcttcatcatccattcttgttggatagcatagtccatttgtctgggtttttagtaaacaacgggcttaggtactctagcgagtgggcttgcttgagtaccggcttcgacgagtggcaccttctgaaaccgcttgatccgactaccgtttacacttcttatacctttatggaggacagcaggtcaacctcaaatttagtgacaggagatgtgtatgtgtacgacggcgaggagcttgtttcagtgttaacaggtctgcaatttcagaaaatgaagagaaccgctttaacacacctgctaagtccccccactgtcggcactatggcagctaagccttctacatgcatcccgactatggctgaaaaagaattattgccggcgcaagcgagggttgcgggcttacctgtgcctacaccacccgccacggcgagtgtcgacgacggggaaggagataaattcgacttagttaatacattgtttagtattattgcgagagaggtgggggtggagcctagtgatctagaaggagacgtgaacttggctaatttgggcattgactcactgatggcaatcactattatctctgtaatgcaacaggagactggtgtggaactgcccggtacttttttccttgataatgcgactaccactgccgtaattgcagctgtaggc

SEQ ID NO: 45 - DNA, 1131 bp, Artificial Sequence
  PKSC15C
atgtcatccgccgtaacggtgtggcaggatgcactgaatattatcgcacaagagagcggcttagaaccagccgagataatcgaaacagatgatacggcgttccttacacttggcatcaatcaaatactggcaaccgccatcttagcacatcttagaggtccaaggggggaaccgttgccgagagacatattcgaccaaaagcctacagtaggggccttccgtaggttctatgagacgccaatccatctggacatagctcccgtggctgcgccagcccccccgaagctaaaaagggtaccttcctcaagcgtacccctgtcaatagtactgcaaaataatccggctagtagtaggcacaccgtgtttttacttcctgatggtagcgggagcgcgatggcttacgccaacctaccacctgtacacccagctgtctgtatcgtagggatgaatagcccctatttgagggacgcgggatcataccgttgttccgtagaagatttagcatcacaatgggtcagagaagtgtaccgtcgtcaacccagaggaccatacattgttggcggttggagcgccggtgggtactactcatacgaggtcgctaaaagactactacaggatggccatgctgtggccaagttgatcttaatagatagtccctgccgtacagtctttgagtcactatcaatggatgttgtcaactatttgtctagcaggaatcttatgggaaactggggaagtccagaaatgccagaatggctggtccaacatttcagaagcacactggcagccgtggggaaatatcgtcccagaccgatcgactctcctggcaatatgcaaacgtatataatctggtccagagatggtgtgctggatcaggacgcccttgctaggtctggtctggatacttccgttaaagtctctcgttttcttcttcaagggaaagatgacctaggacctaacgggtgggatgacttgttgccgtcaaaagatatggcaattgctacacaaagtggcactcattttaccatgattaataagccgcacgtcgcgcagatgagtgacctgctaagagacgctgttatagggataggtagcgatagacaggcgcattggcagagagtttcccaatct

SEQ ID NO: 46 - DNA, 7161 bp, Artificial Sequence
  PKSC16A
atgtcatctggcagtgcaaaactgactgactcacacagcgtagcggtaaccggcctaagttgcaggtttcccggcgacggggattcattggatacattctgggaatccatctgcgctgggaaaagcgcatggtccaaaatacctaaagagaggtttaacgtagatgcgttttggtctccgtccaaaaacagaaatactatgacaactcaaggcgcccacttcctaaagcaagacatctctaaatttgatgcaaactttttcagcttgcccaagaatgacgttgaagcaacagatccacagcatagaattatgattgaggtagcttatgaggccttggagagagcaggtcttccactagaaaaaatagcaggcacgaggacgggcgtttttatggggcactttacttccgattacaaagagatgatgtacagggaccctgacaacgcgcctgtctatggcggcactggaagttgcacgaccagcttgagcgctcgtatgtcctggttgtgggacttgcaagggccgtgcttcacgctagacacggcatgcagcagttccttggttgcactacacctggcgtgtcagtcccttcgtacaggtgagtccgacatcgccattgttggggggactagtctgctgttaaaccccgaaatgtttatgtacttaagtaatcaaagctttctaagcccagatggtaaatgcaagtccttcgacgaatcagcaaatggttatgggcgtggggagggctttggttgcgtcatcttgaagagggttgacgacgcgatatctgccggggaccctataagggcagtgataagggggactgggtctaatcaggatggtcacactaaaggtctaaccctacctaacgcgaatgcacaggcaagtctgatagaggatgtatatcgttcagccgggttaggatacgaagacacaggctatatagaagcccacggcacagggacgcaggccggcgatagagaggaatcccaggcccttgctaggaccatcgcgagtgctcatacaagcgataataagcttctggttggatcagttaagtcaaacatcggacatcttgaagcggccgctggaatagcgggcgtaatcaaggcagtattgatattagagactgggttaattcccccatccattaatttcacgaaactaaacccaaaattgaattttgatgaatggaagctacaggttgctacagaactaactccttggccaaccagtggtgtacgtaggattagcactaactcttttggttacggcgggaccaacgctcactcagtcattgacgatgcagcgtcttatcttagttccaggggaatttccgcaacacaccacacacaaataactcacccggaacatgcctcaagcgtcgttggtctgaatgacggatcctcacacgggcgtgcaagcaaagacaggtccggtcctagactgttcgtactgtctgctcaagataaagacggactgaagagagtcaaagacccactggctaagtatgttgaaatgaaaggtactgaacttgagaccgagagcgagcaggccgaggaattcttagcagaattggcatataccctaagcgagcgtaggtctaggttgcaatggaaatcctacgcgatcgcttccagtagcgatgagcttagcgaagtgctgggaaacgacgaaagcccggcattagtagctcagagttccaggcaacccagattgggctttgttttcacaggtcagggagcccaatgggcgagaatgggtatggagcttatggcttacagagttttcagagagagtgtatatgcagccgatgcatacctgaaggaggcctgtgaatgtccctggtcagccgtagaagaacttgaaaagggcaaaagcacatcccaacttcacctagcagagttttcacaagcgctatgtactgtccttcaggtcgctcttgtggagctgttgagggcctggaacattcaaccgaacgccgtcgcaggacactctagtggtgaaatagctgcggcctatgctttaggagcactgacaaatgaagacgcgtggaagattgcgtattatcgtggggtcctgagcacggagatgaaggcgaacagcccagatgtcgatggatcaatgatggccgcgggacttagtcctgagaaggcagaagaatggatctccaaggtcacagcgggagaactagtcgtagcttgcattaattcacctacttccgtaacaatttccggggataccccaggcatcgaacagctacttgccctgcttcaagatgagaagatctttgcaagaaaattgcaagtagataccgcttatcactccccccacatgcaagcggtagcccaggattattacgaacttctggctgatatcgttcctcaggagccgcgtgctgactgtaccatgcattcatctgttataggttctattatcgaatcaaagcagttaggtgctgtaaattgggttaggaatctggtgtctccagtaaagtttagcaccgccatttatgatatgttaaggcccgtccgtgcggatgaacgtgcaacggataacgccgtcgatcttctaattgaaataggtccacacgcagccttgcaggggccgagcacgcaaagcctgaaagcccataatataatgaacatcccctatcaaagtgtcatagttcgtaaccagaacgccgttgaaacggcgttgaacctagccggttccctgtttgcgcagggataccgtgttaacatccaggaagtaaatgctgacggcgataagcattttgcgaaacctctggtggacgttcctacctatccgtggaaacattctcagcgttattatcatgatgtcagaatcgagaaggagtacttgaatagaaagactccaaaactttcccttataggtgcccccgtgccggcggtcggcgaaagagaacacttatggagagggcacatacgtctgtctgaagaatcatggatcggtgaccacaaaattcaaggtgcaattctataccctgcagcgggctatttagccatggcactggaggcttcattccaaacggccgacgtttctaaaagaatcagtgcctacaaacttagagacatccaactaacttctgctgcgataatcagtgacgaagctgacctagagtgcatagtgcaactacgtccgcatattgttgcaacgagagacggtagctccacgtggaccgaatttacagtcactacaagtcctgatggttcttctttagtgaagaactgctctggtctggtttatatcgagtacgagtcagcaagtgacagcgaagcgagcaaagagaaagagttggaacaacaggctcaaaaagatcagtattccagggttaaagcctcttgtaataataagataaattgcgcagagttctattccgatttaacaacaatgggtttggagtacggcccagcgttctccaatgttcgtgaagccaggaacgggaacgggcaatcctatgggattgttgagataccggacgttgcagggagaatcccggaagggtgcgacagacctcacattatccaccctggcacgctggacgcagtgtttcacctggcttttgccgccgtaatggacgaaaatgcgttaaccgctatggtgccgaaaagtatcgatgaggttactatttccgcacacgttccgtggacccctggtgtgaagctaccagggtttgccaagagtgagaaacacggctttagagagctgaaagctgacatcgtcatgttcgatggtcaagaggggttacctacaatcgatattcagggattcttatgtgcggagatctcaggtggaagctctggagctgcgcagaatggccctaagcccatagccagcaagcttgtatggaggccggcggttaatttactatctagtgaggagttaagggaggcgctgtcttcacaccagggagccgacaggttggtagaatacttgaaacttgcttaccacagcaatcccgccttgagcatactggaggtggcctctcaaagttcccttcttacaagaagcgaccttagctccttgtcaaaaaccgcggaaatcaccttagcgtgcgtagatgcagaagtaacatccaagttggaggaggcatcccatgatgtggcagttgaaagtttaaattttgcagagaacctgagcgccgactctctgaatgggcgtaattatgatctaatagtcgtgacggacttagactcctttggcgcacaggccgaaagagccatttctaatcttaccaaagtactgaaagccagcggtaggctttgcatattagcctccgataatgtactagctcagatacagcctacatttgatgccaaagttctacaaactacactgtttgaggactccaaaaggagcctggcactggtgaaaaaaagtgcccctaccaacgggactaatggcgtcaacgggcattcagagtccgaatccgtcgtgcttatacagccttttgaaccgagtgaaaaaaatacatctattagcagggagatcagtaaaacactagagggtcatggcatcgaaactgaaatatttgtatggggatccgacgttgccgcattggcagggaaaacttgtatcagcctattagagttagactctccctttcttgaggatttacctgagaagtgcttccaaccggtgaagacagtgatcttggaatcagcttccgtcttttggatcacgggcttcaacgctccctccgcctctatgatcgacggtctggctagggtggttcgtaacgagactccgggactgagaattcgtacacttcatgccgatgaatcctcacttgctagccctagaagattcgcggaacacttcgatagagcattctcatctaaatctgaggacgacgagtacttaatcaaaggagatttactgcagataagccgtatagaagaggataccacttttaatgatcaaatcaacggtctgttgcccaacgcagccaagactataacgaacatgccattaaaagagatcccacatgctgtcaaaatggtcattcagacccctggaatgcttgactcagttgccatggagattgatgacttagcgggaacagagctggagccgaacttcattgaagtgaaagtagtggcttctagtatcaactttcgtgacgttatggttgcgatgggtcaaatccccgatagcaagcttggcttcgataacgccggctacgtaacgcgtgtgggcagtgctgtaacaaagttcaaggttggcgatagagcctgcatgtacggacatggagcacatcgttctatacataggagcagagaggactattgtgccttaattccagagaacatgtctttcgaagaggctgccacagtaccaggcattcatggaacagcatggaacgcccttgtccgtcttgccagggttgagaagggccaatccattcttatccacgcagcggcaggtggggtggggcagagcgccatacaggtagctaaacactacgagatggaaatatttgcgaccgtaagtagcgaggttaagaggtcccttcttagagatgaatatggcgtgcctgatgaccacatctttaacagtagagacctgtccttcgtaaaagggatcaagaggatgacgaacggcagaggagttgacgtggtgctgaactctctgtctggggaagcattgcgtcaaacgtggcactgcatcgcgccgtttggctatttcgtagagataggtctaagggacatactggccaacacgggattggacatgaggcccttcatgcaggacgccacattctcatttttcaatttgaaccatatagaaaaatcaagaccagatgtgatggcagcgataatcgagggatccttcgatttctttagacgtgggatatcaaaacctgtcaagccattagtaagttacccaatttctgacatagaaggagcgttcagattgatgcaagctggtaagcacgtcggcaagttggtgttcacatggggtgacgacgatatagtcccagtgattcaacaacaaaaatcctcactgaaactggatcccacagcgtcatatgttctagtgggtggtcttggaggacttggcaggtcactatccactaaactggtgtcacttggggctaggaagttagcgttcttctctcgttccggtaccaagtcaactgcagctaaggaattggtgcacgacttggagcaacagggcgtccaggtccaggcacatgtgtgtgacgtggctgacgaacaaagtgttgcagcgagcgtcgctaagacgactcaggagttgggcaacatcaggggcgtctttcagtgtgctatggttttaagggacacattattcaccaacatgacgcacgagcaatggttagaggcgaccaggcccaaggtccaaggatcttttaacctacataagcatctgcccagcgtagacttttttatatcattgtctagtttcgctgctgtttttgggaaccgtggccaggcgaattacgctgcagcaggggcttatgaggacgcacttgcgtatcacaggagagccgagggtaagcacgcgaccacactggatcttggcataatgagggatatcggagtgcttgcggagacgggtatcacagactctctaagagactgggaaaaaccatacggcataagggagaatgaatttcacgcacttatggagcgtgcaattgacggtgacataaacggtacgagtcctgcgcagatcatcacaggcttggcgaccgggggctcagcgctggcagccggcattgacacaccgttctatttggacaatagccgtttctcaatactaagtttaactgggactagggatcagtccaattcaagcggcagcagcgcacctgtgcatactttgattgcagcggctacgacgttggaggaagcgcaaacagctataaccgacgcactagttaagcaagtggccaagatgttacaaatgcccgtcgctgaaatagatacagggagattcttacactcatatggtatagattccctagtcgcaatagaggtcgttaattgggcactgaaagagtgtaagtctggtgttaccgttttcgacgttctggccggggttcctataacgaccttgaccgggaagatggcggctaaaagtgcggttctaaaaaaagagcttgtgccgatt

SEQ ID NO: 47 - DNA, 6129 bp, Artificial Sequence
  PKSC16B
atgtcctctgcctctagcaccactatccctagaagtcctgaagcatccaaaccgacgaatttggtactgtttggggaccaaacggtcgagaaaaaaagcagcattcaagcattagtaagacattctaagacaagtcacgctgcaaggcgtctattgcaggaggccacagacctggtacaactgcacttcgcgcaattgagtaaagaagataaacagtgggaccatgaggtgggatccttactgggcttagcagaagataacatcgctgagagtaaaccgaatggagctatagcgacagtactgatgtgtatagggaggcttggcgagcttcttgtttatgcagaagaagacccttcaatcctaggctcagagaatgacccagtgcaggtgctagcgttttgcacaggtttactgcctgctgcagcgttagtcgcggccagagatacgagcgagctgttcgatttggcaagagagatcattgcaatcactcttagaatgactttagaaatgcatcagcgtattataatgatagaggacacgaatcttagctgggcaaccactcttgtggggaagacaccggaaatggtacagcctattttggacgactttcacaaggctaaatccattccttaccctaaaagaatcgccgtggcagtagtaagttcaggctggttaacccttatgggagcgccgtctagtctaggacgtttaatggagttttccaaggagctagaagacgcgccgaaaatgaagacagagaccaatggtgctgtccacactgaatttatgccaacctacgacctggacaaagtccttgggaatagcccacttttggacaccccgatcacctcaaaagccagaattcattctcctgcgtcctgcaccccttactcccacacaacgttgagatctctgttgtccgagatattgcctgatatagcgcatcgtatacttagaatcgacgacacctccgaggcatgtattagtgacatagttggtcaacgtcccgtcacagtcactgttgcaggaccaaccggacatctaccagcggtggagaaagttcttaaaaataagaatatacagtatcagattaagcaacacagaactccctcaactgattctgtatcaagaggcgggtcagacatgattgcgatcgtggggatggccgccaggctgccagggtcagacaccgtcgaggcattttttgaaacactactagcagaacaaatacagataaagaaaataccaaaatctagattcgatcttgacacctattatgatcccacggggcagcgtagacacacgaccacaaccgatcaaggagccttcttggaccgtccagggtattttgacaatagactgttcaccatcagcgctagagaagccgcccagatggatcctttgcaaagaatgcttctgacgacaagctatgaagcgcttgaaatggccggctattcaaagaatgccactccggccacacaagacaacagaattgcagtctattttggacaagccgcggacgattggagaggcgtcctgaataacgatgatgacatagacatatattatgtccctagcttaagccgtgccttcggtccatccaggttgtcttaccatcataagtgggggggcggaacatacgcgttggacgccgcttgcgcgacgtctaccacggccatacaccttgcatgcaaagccttgacatctcgtgaatgcgacacagcgttagcagggggggggtcactatgcgttagccccacagcattcgcaggattgacgaagtccggtatggtgtccgagaatggagggtgtcgtacgtatcatgacgacgccgacggttacgcaagaggtgaaggtataggtatcgtggtattaaaacgtttggaggacgccatagcagataacgacaacattctaggtgtcattagggggcacgccagaacttatacaagcaccagtacgagtataacacatccaagtgctgaatgccaagctagactatacgaagaagtacttcgtcagactagcgttgtgccgaacgaaatagcgtatgtggagatgcatggaactggcacacaagccggggatcacgaagagatcacttctgtgatccgtgttctggggcaggacagatccaagaaaaacgtattaactgtcggtgcagtgaaggctaacgtcgcccacggtgaagctgtggcgggtgtaacgagtttgataaaggtgctgatgatgatgaaggagaaaaaaattccctcccaaccgggattgcccttcaagctaaaccgtaagttccccaaactagataatgtgaacgttcgtatcgctggattagggtcaaaggacctaacgctgaggcccagcccagccgcctcagacggtaaaatcaaatgtctggtgtcatcctttgacgcatccggcgggaatacctctcttgtaatagaagaggctagcatgagagcgaagaaaaccgagaatccgttgcccagccatatcgtcactttgtccgctcgtaccgcagcgagccttcagcagaaccgtaagagattgcttgattacctaatgcgtaacacccagacgaagctagctgatctagcttattccacaaccgccagaagaatgcatgaggtgctgcgtgttgcctatactggcaaaagcacaaaggagattataaactcactgcgtgaagacgtcagcaagaatggttcttcagaccctaagaaaaaagctgcgtctcttaacgttgtctttaccttcaccggccaaggctcacaatatgctggaatggggagacagctgtatcagcactctgccgcgtttagaactgccctttcaaactaccagcagattgctatacatcaagggctgcctcagtttctacatctaatatcagatgataaaacagacatagcaagtgccagcgccacacaggtgcaacttgcagtcgtcgcactggagattgccacagccaaattgctagagagttggggcataaagccggatgtcgtggtcgggcatagtctaggggagtatgccgcgctatgtatcgctggtgtcttatcaggatctgatgcattatatttggaattgatcgcaggagaatatctgatgttggccatagggcaggacgtggacaccacacgtcaaatcttagcagcgcaagccccggcactatctaagactgacattgcgtgcatcaatgcccctcaagtcactgtagtgtccggaccggtcaccgagattgaacagctaaaggcccatctggagactagtgggagccgtgccactatactgagaacgccttacggatttcattcacaccatatcgatccaattctggaatccttctctgagattgctttgggagttacattctccgctcccacagtcccgatcgctagtacactattgggaataatggtggaagttggagagaccgctagggaatgcgtgaactacactggcgctctagatagttacaaagcgcacgcacctataaagtcacaatcttccttcgttgagattgggccagagcctatgtgcgtaggattagtccgtcgtactttggatgtgccggccaacagactgctaccgactatgaagagttccgaagataattggattacgatgagccacgcgctggctagtctataccaagcaggagcgaatatcaattggcctaggtaccatcaagcatttaagtcaagtttgactctgttaccactgcctacttatgcttttgacgaaaaagatttctggaagccattcgtagagagaatccacccaacaccctccagtcaatctgccacacagaaggtagcgccatccgccccagcattcaggaccacttcactgcaatggatagaggaagaagcactggaagacacttccgtgagtgtgacgttcgctagccagacgtcagagccccacttatatgaagctattcaagggcatgtagttaacaacgtcactgtcatgagtctatcaattttctgcgatatggctaagacagctgcccaatatgcgtttcagaaacttaatcccagatcaaaagtaccatacatgtctatatacgacgtagatatgagtcatgcgctagttgtaccaaggagtgacccttcccagattgtaaggactaaggtgactttaagctctacatccaccacggcgttgataaagttctcttcaactaagggtagttccaatacagagcacggagaattcaaggtagtcttcgaggatagcgcgagttactttacccagcaaagccaaacatcttttcttataagttctagaatagatactctaaaggagatgagcgctacggggaaagcccataggctactgaaacccgtcatttacaagttgttcgattccctagttgcatatggtaagaattaccaggcgatggaagaagtatgggtcgattccgcctgcagagatgccgtaggaactatcaagctgcccaacacgtcaggttccgggacgttccagaacaatcccttttggaccgacgccgccgtgcatcttgccgggttcttagttaatagtgggctgaagtatcccgaggatgtcgtttgcttgtccaccggattcacttcatccaggatgattgaggagttggagcaggatgaagtttacaccacatatgttagtatgcaggacacggaaaccccaaacgtactttcagggtcagcttacgtctacaactcagccatgaaacttgtacaagtgagtactggaattaggtttcaaaagatgaaaaggatagttctaacgagtatcctaggcggcgcggttacccaaaagccgactggcttatccttgccaccggtcgagaagacagtcgcttggcaaaaggatttaatcgcagtcggggacagggtcatgacgcctagaaccggcatgtccacgccagtgactcaaatgatagactacaacttctccgtagcaggagatagaagcgatgtatcaacacctgcgacctctgtagctgatgtcccatcaagcagcgatcaagacctattgaaaaaaatgcttgctatagttgtagcggagtctgggtgcagtgagggtgatcttgagtccactacatcatttgcagacatcggaatggattcacttatggccatcacaatacttgcaatgttccaaaagagtactggagtcgagttacccccgacattcttcttggaccatcaaactgtcgcggaggctcgtgatgcattgccgggcggagacgcgaatggagggatacccacagttactgtttctgaagctccagctatcagccagactcaaccagaaccggaaccgataatcgagatcgaagataacgtaccgattccggcaagccctttcacctcagatcctatcgaaccgacgaaaccctcaaaagcagttctattacacggtactccaacgccgacaagtagttctctatttttgttgcctgacgcttcagggagcccttccaggtacatacagctaccaccattgggccccacaacgtgtgtctacggattggagagccctttcctgaagacgccgtctgaatttagatgttccgtaccgtcactatgccttagcttcttaaacgccatacaggaggttcagccgtgcgggccatatttggtggggggcttctccgttggagccctttacgcatatgaggtggcgcgtctactaactgaaaagggggaatcagtggaaaagttggtcctagtcgatatgggcgtttccaagagcattgagggtcaggttgacgtcaacttgacaactgttacagaagctggtctactgcccacagtgggaaggatgactgctagtcaaaaggaacacttcgtgagttcaattcgtgcgctgacaagctataatcctacgggaattgcgagcggtaaacaacccaagaaaacgattcttgtcagcagcaacacggggcttgccgcagggaaaacgtctgagttggctcaatgggcacaaggaagcaatggggcagggagaggatggtcagagctactgggtaccagcgtagaggaagaaaacgtcgatgctgagcattggacaatgtttagacatcctactgtctccttcccactttggccgagaagtgcgtcaaggctgatctctgtt

SEQ ID NO: 48 - DNA, 1122 bp, Artificial Sequence
  PKSC16C
atgtcttcaacaacaatggataagatatttgacattgtagccgaggaaatagggatagaaagggacgaactggcggacgatgcggagtttgccgaactaggtgtcgacacttttctggccaaatgcattgtcaccaggatacttaaggaaacaaaaattattctacctactacagcattcacggattatcctaccgcagacgacttacaggcttatctggcgactcttccgataacacctctggtaccaattaaaatacgtggtgcgccaccgtgcccggctagccccgcattcgtgtcaagcggtcctttatcatttgtcctacaaggcaagcaacaaacttgcactaaaactttatttctactaccggatgggtccggaagtgggatggcatacgcgagactaccgatacttgacccgtctgtctgtttgatagcactaaactctccctatttgaaggccccgacatcaactatattcacggtagagggcgtcgccgcccaatgggcggcggagattcaatctcgtcaaccccacggaccataccagttaggtggatggtcagctggtggctattattcatttgaggtggccaagtgtctgatgagaaaaggggagcgtgttgaaaagttggtattaatcgactcaccgtgtaggttggattttgaggccttacctatggaagttgtacagtacctgagtaccaacaatctaatgggaaattgggggaataagcatccgcctgagtggatggtaaatcacttcgacattagtatcagggccatccaacgttacatgcccacccctatccgtggaaaccaagtaccggatgtatgcttaatatgggcaggtgagggagtgttgaagaacggagaccgtcgtccgtccccagcggaagtcgatatgggggtgaagattaccaagatgctgttagagagacccacgaccgtcggggctcagggctgggacaaattatttcccggtaaaagactggaggtcgctagtatgccgggcaatcacttcacgatggtgtacccgcccaattgtgcttctttgagcagtctgctggccgattccgtaagggacaggaaaagagacaggcgtaaccgttggacgatggtc

SEQ ID NO: 49 - DNA, 7158 bp, Artificial Sequence
  PKSC17A
atgtcctccgccactgccgggaatgatggtactagtgtggcgatcaccggactatcctgtcgttttccaggcgatggagataatccctcaaacttttggaagttagtttccgagggtaagtcagcgtggagtatgataccaaaagagaggtttaatggcgacgcgttctgggcgggagggaaaaagggccacggaagcgttacgaaaagtggtcactttcttaagcatgatgtctcacactttgatgcaaatttcttcaacatatctgcccttgaggcaaatgccatggatccacaacatagattagcgctggaagtagtgtacgaagccctagaaagtgcaggctattctgtcaaagacttggccgggaccagaaccggagtgtttatggggcatttcacgagtgactataaggaattggtaatctccgatacagacgggatccccccctacgcgacgaccggtctaaataaaacgtccttagcgaacagaatctcctggaccttcgacctaaggggtccatcttttgctttagatacagcgtgctctagttccctggttgcattccatctagcatgccagagtcttagaaccggggagtccgatattgcgatcgtgggggggaccaatgtcttgcttaaccccgacatgtttgtagcgtttagtgggcagggatttttgagtcctgatggtaagtgcaaaagcttcgacgcaagtggcgatggttacggcaggggagaaggggtggctgcgattgttctgaagcgtgttgatgacgccatcgttgccttagacccgctaagagccatcattagggcaacgggctctaaccaagacgggcacactaagtctctaactcttcccagcgctgacgctcaggaagccctgataagggacgtgtacagattagctaaactagactttgatcaaacggggtatgtggaggcccacggcacggggactcaggcaggagatactacggaaacacttgccttatccagaacgatcgcgaaaggtagatcctccaaaaacaaacttgtagtaggaagcgtcaaggcgaacataggtcacttggaggctgcctcaggccttgccggagtcattaaatctgtgttgatgctggagcacggcgtgatcccccctaatatccattttcacaaccccaacccgaagatcgactttgaaaattggaacatccaaatacctacccaactgatgaaatggcctagcgaaggtactagaaggatatcaattaatagcttcggctacggtggtactaatgcacatgcaatcttggacgacgcttattcctacctaggtggacgtggacttagggggcttcattatgttagtagtggtgatcatgagaacagggaagaggaggaggaggacgatgaatataattctcaaccgaacacgcctagggtttatgttcttacagcccaggatagagccggtttgagtaggacaaagaagagtctttcttcctatctaaggaccaagattgatgagttacaagacgacagtcaagccgagaactacttagcggacctagcatatactcttagcgacaagagaagcagattacaatggaagacctttgcgttagcctctagcctagatgaactggctgacgctctggaatccgctgacggcggtagaatagaggtcatgtcttcttcagtgcccaggttagggttcgtgttcacgggacagggagcgcagtgggccaccatggggatggcgcttatggcctttcccgaattcagcgcgagtatcgaggctgcagacttattcttgaaaaaaactctacgttgcccatggtcagccagagccgaattatctaggggtaagggtacgtctaggttgggtctggccctgtacagtcagacattatgcaccgtactgcaggttgcacttgttgatttgttgaggaaatgggccgtagtaccagatgctgtggttgggcactcttccggtgagataggagccgcttactgcgcaggctatctatctagagaagacgcctggagaatagcctactgtcgtggtgtcgtctgtagcaacatgaaaacggccgcaccggatctggagggggccatgatggctgtaggtgctagcccggatacatgcagcgccttcattgagcgtgtctgtccggacaaggtgaacattgcgtgcatcaattcccccagttcagtgactctttctggagacgcagcagctatcatttcattacaagccgctttgcaggaggaaaacatcttcgcaagaaagttactagtggataccgcctaccacagtaagcatatgaagctagtggcagagcaatacgcaaaggccattgcggatatccaacctagagcgaatactacgaccggcggcgatgccgcttgcaaaatgtacagtagtgtaactgaatccgaaattacctacaaggacctgggcccagattactgggtaagaaacctagtcagcccggtgaaatttgcgacggctattcaaaacttaatgaggcccgacgcggacgcgcgttcaagcgggaccgatgctgtagatatcctggtcgagattggaccgcatactgctctaagaggccccgccacccagtctattcaggctcttggcataaacaacaagccgtacttaagcgcggtcgtcagaaatgagtctgcagtggagacaacccttaatctaattggcactttaatcgcttatgggagaccagtcgagctggcatccctgaatggtacagccacgggaaagaacaagatcctggtcgacctgccaagctatccttggaatcacgcccaacagtactggtctgagagccgtttggcgagagggcgtaaggatcgtcccgtgtctgcctcaagcttactgggagcaccagtcccgtccttcttagaaggcgagagggtgtggagaggcttcttgcgtctgagcgaggagccttggatggcggaccataacatacaggacagtgttctataccccggggccggttttctagctatggctatcgaggcagcattgcaaggagcagacaccacccgtaaggtcaaggggttgtccttaagagacattgagttccttagcgctatgcttgtgcctgaggatgaggagctggaacacaccataacattacgtccccactctagcgtaactaattcttctgaggaattatggaatgagttcgttatctgttcctctccagacaggaaaagtcttgtaagaaactgccgtggattaatccgtgtatgttacgacgacagtggagcggaaaatttgataagtgagaaggaggcgcaggaggattcaggcctactgaggtacaagcaagcgtcaagctcttgtaaggaagaacaacaaccggctgagttctatcaaaccttgactgatttaggatacaactatggcctaacgttcgcgaatattactgaggttagcgtcggtgatggccagtccaggggcagtgtaacaataccttccgtcggactacatgatacacagagaccccacgtcattcaccctgctacgttagacgcgatgttccacctggcattcgcggctgcaaacagcaatcatctatctaagctgacagtaccgatggtcccaaaatcaatggatgagatgtatatctccacagacatcccgtacctagctcagacaaaattaaaagggtattcaaaggcccgtaaactaggctctagaagactattgaaggctactatcggtatcgttgatgaggaggagcaacgttccgttctggagatatctgggctacactgcaccgaaattgctcaaacgtcagccgcgcaaaagacggctgtattagctaggaaaatgtgcagtaaattagtgtggaggccctccatcaatttcatcacgaatgaagacatccagcgtatagtaagcatcagcacagagttgtcaacacaaacctccaattatcaacagttgtcagaattcattaacatcatccaccacactacgccaacgatgcgtatagtggagctggcacaagagtcttcaacatttgcacaagataagaccttgctggaagacgttctgcaaaccgctaactatacaaccttaggttacgacgggaaaacaaaatcaggtccgggcgtcagtagccccgcagcagagggagtcacgttacaagccgaccaagacttattccaggagcatgcccgtactgccgacctagtggtttgtagtgccatctctagcgctccttctaacatagcgaataatgcacgtttattattaaaggaggatggcagggtgtgtgcgatcgaggctccggagcaggttgcaactaccaagtccgtattacaagaagcgggttttacaaatttctttcaatttggtggttccgcttctggtgagccggtttttctagtggggtccttggagagctcagaaaacgtagccgcaaccgggcttaaggagaagaatttagtacttatacagcccgccaatgttgacaagagtgtcacggcggttgctgaacagttaaagactacgctttccgcacttgggtatggaacctctatccacacttggggaattgacaacgttagtgctcttaagaacaaagactgcgtagccttgcttgaggcgcaaagtgcggttttagagagcctggtagagaaggacttctacgctgtgcagaccttaattacgcaatgtaagagtttgctgtggatcgacgccttagatgacgctcgtaaaggtctaatcaatgggctaacgagggtggtaagaaacgagatccctggatcccaactgcagactctacatgtgagttctgcgtccttgagccagcctaaaaggctttcacaccttatctgccaagtccttggcagtaaaacgtctgataacgagttcacagtcgaaaacgatatgatatacacatcaagagttgtgatcgacgaagaattgagcgcggaaattgatgaggcgcagcaagcaggtgcggatgctactagccatgtaccgctgacttccattgatgctccattgtcccttacgatgaccagcacgggtacggtgtgttttaagcgtgatagtgttcctaccgctgacctggaaggggacgaagttgaaattaacgtaaaagcttccactatttcaagtaaccatttatttgcagacactgatgaaccgcttatctttgaggccgcgggtgtaatcgttcgtgtcggcagcagtgtcactaagtttcaacccggagactccgtggtaacctacagtttggggctagctggacaaaccctacagaggactaaagccgatttttgccatttactacctagcgggtatacgtttactgaagctataagcggtgcagcagcgcacgcagcagcatggtatgctcttgataggataacgagaattcaaagcggccaatcaatacttattcacgccgcggctgaagatgttgggcaagcggcgatacagatcgcacgtaactataatgtcgagatatacgctactattaaggaggaaggggaaagagaactactatgcgatgcatatgacgtacctagcgaccatgtatttaacctacaggattcacatgcagtagattctatcaaacagatgacaaacggccgtgggattgatataatcctaggcagtcctaggaatgccgctcataggcagacttctcagtgtctggcggcgttcggaaccttcgttgaaataggtctattagactcttcatattcaaaggttcttgacgcgacctttgtaccacaagacacgacattttcttctttctctttatccaacattgcgaggaaaagcccccagttaatgactcaaatcattgcagcagtgtttgagttgcacagcaaaggtataaccaaaccgatagctagctctaaggtatttagtgcatcagaagttgaatccgctgtgcaatatgctcaaactgagggacaggataaaacgattatccttagttggaacgacgatgattctgtgcctttaatgggctctggcgagcgtcagccaatagaccttaatctacgtaacgacgcgtgttatatccttgttgggggcctaggcggactaggtagaagtcttgctatcatgttagcggagaacggtgctcgtaagttgtgcttcttgagtcgtagcggagcggcctccgccagtgcgaatgatttaatatccgacctagaggaattgggggtacaagtgagatgcctgcagtgcgatgtgagcgagataagtgcattaaagaacgcgcttgatgtatgctccgcagaacttggcccagttcatggggtcatacaatgcgctatggttctgagagatactctgtttactaacatgagctacgtgcagtggcaggagagtacgttacccaaagttcagggcacacaaaatctacataacgcgttacccgacgttgacttctttgtagctttaagttctttcgccggaacattcgggaacaggggccagtccaactacgctgcagggtgtgcataccaggatgctttagctttacaacgtcgtgatgaaggtaaaaaggctactactttggatgtcggccttatgagggacattggggtcttagccgagaatggcatgactgacaacttaaaagaatgggaggagccatatggcgttagagagggtgaacttaggaacttggtgaagcttgccattgcaggcaggttacccgcacaagtgctaactggactggctacggggggcagcgctgttgtggcgggcatcccacctccgttctacctttctgatgcgaagttcagtatcatggcaacaacggatttagagaaggtgtccgactccgctggagacagcaacaacaggcgtaaatccgatagtatccgtgctctaatttcaaaatcagaaagcttagtagaggctagtggacacattacagcgtcattggtatcaagaattgcaaagatgctgcagatcgaagcggaagacgttgatacctccagagcactacatagctatggactagatagcctggtggctattgaaatagttgactgggcgttgaaggagattgaagcaagagtaagcgtctttgacataatggcggcggtacctattacggcgacggcctccaaaatcgccaatgccagtgcattatgcagtaaagaa

SEQ ID NO: 50 - DNA, 5196 bp, Artificial Sequence
  PKSC17B
atgtcttctaccgccattaccaagaggcaccttttgttgtttggcgatcagactgtagagaagctgaccagtataagggcactggtcagaaacgctaaaacgtccccggctgcgaagcgttttctacaagaaataacggatgtcattcagatcgagtttagtacactgtcaaaatctgaacactgctggacaggtaccttcgataccctgttgggcttagccgaagaaaacgatgaacagaatggtgccaacactcttgtgagtacagtattaatgtgcatcggtcgtctgggggaactggtggtgcacgcagagagggaccctactattttagggactcctgagcgtccagttgaaatacttggtttctgcaccggactgctacccgccgcagtagtcgtcgcggcaaaagatacgagtgaacttcatacattagcaagggatattgtccaggtgaccttcagaatgactcgtgagatagtaagacagaccaagcttgtagaggactcctccggggattgggcacgtacgtacataggtatcacaagggaaaaaatggagtccatcttggatgatttccatacttctaacagcatccccccgaccaggcagatcagtgtaggtgtagtcagcgagaaatggaccactataataggcgctccgtcttctcttgctagattaagttcatggtctagcgagattcaatcagcgagccatgcaaagacggatataggtgccttgattcactctaaagtcttacccccccttgacttggaaaagattctggcgccttttagctggagagatagggttcttgattggactaaggctaggatgatatctcctgcgtcttgcaccgactatacaaacagtagcctaggatctctgatcggccaaattatcaacgacatagcgagtaatgctctacttatagatgaaacgatccaggcttgcatatccaggctagacaaagccacatcatttggtgttatcgtcccgggacccactggatacttgccagccgtcgagcaggctttcaggtcctccaaaatccaatatgagcttaataaagagacgaccgatgctacgggaagcggtagaggtggtagtgacatgatcgcaatcatcgggatgtctggtagattccccggtactaactcaccagaggaattctgggacgacgtgcttgcagctaactgtcatatagaaagtgtccctaaaagcagatgggatttggacgtatttttcgacccggaagacaagtctacacgtaagaacgccactaccgctatgcacggagcttggcttgaaagtcccgggttatttgacaatagactgtttaatatgtcaccaagggaggcgtctcaagctgacccgatacacagattactgttaacaacctcctacgaggctcttgaatccgccggctattcacccgacggcaccatttcaacggagtctaacagaatcgccagtttctttggtcaaactagcgccgactggcaggatgtcttgaatcaagaaggtatagacatctactatatcccaggagtgggtagggcatttgcatctggaagggttaaccatcacttcaaatgggggggcacgtcactttcagtagatgccgcatgcgcgaccgggatagcaactgtatctctggcagtctcagcattgctggccagggaatgtgacatggccttagcgggcgggggcgccgtacacgttagtcccaacacatacagtggactatctaaggcaggaatggtatcaaccactgggggctgtcgtacctaccacgatgatgcggatggctatgttaggggagaaggcgtaggcgtagtcgtgctgaagcgtcttgaagatgctgtcgcagaaaatgacaacatattgggtgtaattagagctgcggcacaaacctacacttctacgtctagttctatattacacccatctcacgtttctcaagaaaggatctatagagaagtcctgcatcagagcggactacaaccgcaggacatagattatgttgaaatgcacggtacgggaactcaagctggagacgttgaagaaatgaccagtgtaattaacgttctagcaaagaaccacactaagaacgaacctttgacggttggggctgtgaaagctgttgtcggccatggagaagctgccgctggagtgacaagcctgatcaaggcgctgatgatgctgagagatggcctgattcctgcacaacctggttggccttttaaggtcaacaggaattttccctccttgtccaaggcgaatgttagaattgcgacaaagactttagatttaaagccatctagcaaggccgacaaaaaagcgaaaatcctaataaatagtttcggcgccagcggctctaatagttgtgtcatcgtcgaggagccaccagagattcccgaaaagcaagaggaccctagaggcttccatgtcgtaacccttagtgctaggagtgctttcagcttgaagaagaacagggaaaatttaatcgattacttagagagaaagcctgagaccaggttagtagatctagcgtactcaacgactgcccgtaggatgcatgagactctacgtattgcatatgtaggtaatagcgtcagagacgtagtgcgtcagttgaggcatgatgcgactaacgggggacccaatgacccaaagtctaagactaagaaaagtcccaggcttttcttatttaccggccagggatcacaatacgctggcatgggtgcagaactattcgcagcggataaaggatttgctgaattacttggcacctatcaggacatggccacgaacttaggtttaccggaatttgtagatattataagcaacaaggagatcgatttaactactaagtctcctgcacaagtacagctagcggttgtggccctagaaattgctatcgcgcatactttaaagaagtggggggtcttcccggacgctgtattaggccattctctgggggagtatgctgcccttgcggtgtcaggggcattatccgtggcggatgcattgtacttggttggaaaacgtgccctgcttatggagaagcatttggaacctcatacgtacgcgatgctagtgacgagtttgagcgccgaagatttacaacaaaaaatagtggagctaaaattggatagttgtggtatagcctgcgtcaacggtccctctgtagcagtggcatcaggtcccgcaaatgatctaaagaaactagagcagcacctactagacgcaagcgatataaagagtaccttcttaaaggtaccttttggtttccacagtgcgcaggtagagccaatcctagaagaattcgagaaaattgccaacggcgtgaccttcagcaatacgcataccaccttcgtctcctcattgacaggtacgacggagagtagcgtgtcaccggcgtatttgtctcgtcagacaagagaaagtgtacagttcaccaaggctttagaagcttgtgaggcggctggactaatcggaggtaacagccttactatggagatcgggcccgatccggtgtgcttatccctagtacgtagaacactaaacataccggcctctgcaagattaatccccagcctaaaatcaggtcaagataattggagtaccataagcactgctctaaaagccgcctacgagaccggtgtaaatgtcaactggccagaattccacaaggggttcaaaaactctgtcaggttgcttgaccttccgacttacgccttcgagtataaagacttctggacaccttatagagagttagaaccggttcccactgcaccatcaccggtggttgaaaaagtacagccccctaagtatccgggtttcaccgcgacaagctctgtacaacgtattgaaagtgaatctatccaggggagcaagataacagtagtatattcaagtgaaactagtgaacccgcgcttttgcaagcaattcaaggtcattcagtggtggggagaaccatctgccctatggtagtttattgtgacatggcgatcgcagctaccaagtacgcgtattggcgtttgcacgatacgaagcagactccagatatgagtatttccgacatggagatggccagggccttagttattgaagaacgtgggagtaggccagtgataaatatcaggaacgtgtataaccaagatcaaggctttgcacgtgtaactttttacagcataacgcccgaggggaaagaagtagcgtacggagcctgtaaagttaaagtggcaaagggggcggcccaaaaaaatagtccacaacaattagacttccttttaaggtccaggatggtaacccttcaagaatacagcaagaatagaaaagcgcacgcgtttttgaaaccggtagtctacaggctatttgctaatgtggtagggtatggcgaggcctaccagggtttggaagaggtcgtcgtcgatacgagaggctccgacggaatgggtaccgtgagactacctcaaagtgattccaccggtcactttacattagatccgtatttaaacgacgctgcaatccatttgtgcggtttcctggttaattcagggttgaactaccctgaagatgacgtctttatctgtcctggttttcagtcatggaggtttttcgaggccctacatccaggtaaggcctattccacatacgtatatatgcaggagtccgcttctaatgatgggtccatgagcggtaattgttatgtcctggatggcgataggattgtccaagaactagttgggataaaattccacaagatgaaaagggctgtcctgcaattaagtttgacatcaactggagctcagccacgtaatccaccagctgaaacacatcgtcccaaatcccctattccacaacagttttcaagcattgaaacaactactatctcaatcactgaaccacaagcgtccgacgatagcgcaagcgcgggtactaaaacaccagaggcaagcgattcagagattatagacacgttactgagcattgttgctagggagatcggagttaacgtggaggaaatgttggatgagacggctttcattgacctaggcgtcgacagcctagttgcagtgaccatatttacgacacttgagagggaagtagggctgaagctacaagcatcttttttcgttgaacacacaaccgtgggcgacgtaaagagagcattacacgagatgtta

SEQ ID NO: 51 - DNA, 1125 bp, Artificial Sequence
  PKSC17C
atgtctagtcccgatacagctgcgtcacccaaggaggaattattagctgtgattgctgaagaattgggcatggatatagatgatttgagcgatgacacagatattagccatttgcaaaatgatacggctctatccagactgatactaaagcgtgttccattttccctgcaggacgacataaatcgtaccacattccagtcatgcacagacatcggggaccttaaagcacacatcgatcaagtcatgacgctaagagaacccccaaagcaatcagacaaaaggaaagccaaacttccaatagtattgttgttgcgtgggaatgaagctacagctaagaaaaaagttttcttgttacctgatggttcaggatcaggtatggcatatatgtccatcccaccgatcgatccttccatctgcttgtacggtatcaatagcccgtatctgcatagtcccgaagtcttcaatggaaccatcgacgacctagcgcaaatctggactgccgaaattcagaaagtccagcctaatggtccttatacactagggggctggagtgcgggggggtattttagcttcgaggtgagcaagttgttgattagcaagggtgagcgtgtcgagaaattaatcttaatagattccccctgtaggctgctttttgaggcattaccaccacaagttgtagagtgccttgcaaagaataatctaatgggtaactggagcgagggcgggactccgaagtggctggtcaatagttttgtatcaaccataggggccgtagaaaaatacatgccaacgcccatggtcatgccagacggagctaaagctcccgaggtttttattatctgggcttccgaaggggttttccccgacggagtcgaggcatacccagaactagatatgagcgtaagggttacgagatttttggttaataagcgtgtacaatttggacccttgggttgggatagactgtttccggctcaagacatatctatagcgaaaatgcctggatctcacttcatgatagttcaccaaccaaacgtagatactcttggcaaactattgggtgacgtgatacaaggcctgcccgccgagaggaagagtcattggactgtttggaggaataggtca

SEQ ID NO: 52 - DNA, 7158 bp, Artificial Sequence
  PKSC18A
atgtccagcgcgacggccggaaatgatggaacaagtattgccatcacggggttatcatgcaggttcccgggagatggcgacaatcccagtaattattggaagcttgtatccgaggggaagtccgcatggtctatgattccgaaggaacgttttaatggagatgccttttgggcagggggtaagaaaggccacgggagcgtgactaagtctggacattttttaaaacatgatgtatcccacttcgatgccaactttttcaatatatcagcactggaagccaacgcaatggaccctcaacataggcttgccttagaagtcgtttatgaagccctggaatctgctggatattccgtaaaagatctggcagggaccagaacaggcgtattcatgggacactttacatcagattacaaagagctggtgatctccgacaccgacgggatacctccatacgctacgactggtttaaacaaaactagccttgcaaatagaattagctggaccttcgatcttcgtggtccctctttcgcgttagacactgcatgctcatcctctttagttgcttttcatttagcatgtcagtcactaaggacaggagagtcagatatcgcgatagtggggggaactaatgtcttattaaaccccgacatgttcgtggcgttctccggacagggttttctatcccctgacggaaaatgcaaaagctttgacgcaagcggagatggctatgggcgtggggaaggcgtggcagctatcgtacttaagcgtgtggatgacgcaattgtcgctttagacccgctaagagcgataatccgtgcgacaggatcaaatcaagacggtcatacgaagagcctaaccctgccatcagctgatgcccaggaggctctgatacgtgatgtgtatcgtcttgcaaaattagactttgatcagaccggatacgtagaagcacacggaacgggtactcaagcgggggatacaacagaaacactagcgctatcaagaacgattgctaaaggcagaagtagcaaaaacaaactggttgtgggaagtgttaaagcgaacatcggtcatctggaagctgcgagtggccttgccggtgttataaagagcgttcttatgcttgagcatggtgttatacctcctaatatccacttccacaaccctaatcccaaaatagattttgaaaactggaatattcaaatccctacacagctaatgaaatggccttcccagggtacaaggaggatatctatcaatagcttcggctatggtggcacgaacgcacatgccatccttgacgatgcctactcttatttaggaggaagatctcttcgtggtttgcattacgtgagctccgaagatcacgaaaatagagaggaggaggaaggtgacgacgaatatagctctcagcctacgaccccgagggtctacgtattaaccgcccaagatagggccggactaagtcgtacaaagaagtcactaagttcatatttacgtaccaagattgatgaattacatgacgatagccaagccgagaagtatttggctgaccttgcttatacgctatctgacaaaaggagtagattgcaatggaaaaccttcgccttagcgtcatctctagacgagcttgcggacgcgctggaatcaagtgacggaggtaggatcgaagttatgtctagttccgtacctaggcttggttttgtttttacgggtcagggcgcccagtgggcgacaatgggtatggccctgatggccctgccagaattctcagcttctattgaagctgctgacttgtttcttaagaagaccctaggatgtccgtggagcgcgagggcggaactgtctcgtggcaagggtacgagcagattaggtctagctttatattcccagacactttgtacggtcttgcaggtcgctcttgtggacttattgcgtaaatgggctgttgttcctgacgctgttgtaggccattccagcggagagataggtgctgcctactgcgctggctatctgtctcgtgaagacgcatggagaattgcatattgtagaggtgttgtatgttctaatatgaagacagccgccccggatctagaaggagcgatgatggccgttggagcaagtcccgatacatgctcagctttcattgagagggtgtgcccagacaaagtgaacatagcatgcattaattccccgagcagcgtcacattatccggtgacgcggcggccatcatcagcctacaagcggcattacaggaggaaaatatttttgcgcgtaagctgcttgtcgataccgcctatcatagtaaacacatgaaattggtggctgagcaatatgcgaaggctatcgcggatatcagacccagggctaataccaccactgggggagatgcagcatgtaagatgtacagttcagttacagagtcagaaataacgtacaaggacctggggcccgattactgggtccgtaacttggtcagtccagttaagttcgcaactgccattcagaacttgatgcgtcctgacgcagatgcgagaagctccggaactgatgcggtcgatatcctagttgaaatagggccccatacagccttaagaggcccggcgacgcaaagcattcaagcccttggggtaaacaataagccatacttgtcagctgttgtgcgtaacgagagtgcagtagaaactacactgaatcttatagggacgctaatcgcctacgggcgtcctgtagagttagccagggtaaatggaacagttactgggaaaaataaagtactagtcgatctaccttcttatccatggaaccatgctcaacagtattggtctgagtctagattagcgagaggccgtaaggatagacccgtaagtgcctcctcattgttagggtcaccggtcccatcattcctggaaggtgaacgtgtgtggcgtggctttctgagactatcagaagagccctgggtcgcagaccacaacatccaggacagcgttctgtacccgggtgctgggtttctagccatggcgattgaggcggctcttcagggtgccgataccgcccataacgtgaagggtttgagtttaagggatatcgagttcctgtcagcgatgctagttccggaagacgaggaactggaacacactattaccctgcgtcctcattcatctgttacaaactcaagtgaagaactttggaacgaatttgtcatctgttctagcccggacaggaagagtctggtgagaaactgtcgtggtctgataagggtatgttacgacgacagtggtgccgaaaatcttattactaagaaggaagcccaggaggaccccgggttattaaggtacaaacaagcttcctcatcctgtaaagaagaacaacaacctgctgagttctatcagactcttacggatttgggctataattacgggttgaacttcgcaaatatcaccgaagtatctgtgggtgatggccaatcctgtggttccgtgacgatccccagtgtcggcttgcacgatacacaacgtccccatgtcatacatccggcgaccctagacgcaattttccaccttgcatttgccgcagctaactctaatcatttgtctaaacttgccgttccgatggtgccgaagagcatggacgaaatgtatatctcaactgatataccatatctggcccaaacaaaactgaaaggctattctaaggctcgtaaattgggaagtagaagacttttaaaggctacaatagggatcgttgacgaagaagaacaacagagcgtgcttgagatttctgggctgcactgtactgagatcgctcagacgtcagctgcccaaaaaacggccgtgctggcaagaaagatgtgtagcaaattggtttggagaccctctattaatttcattactaacgaagacatccagaggatcgtatctatcagcacagagcctcccacccaggtgagaaattaccaacaactgtccgagttcattaatatcatacatcacacgacgcccactatgaggattgtggaactggctcaagagtccagcatttttgcccaagacaaaacaatattgaaggatgtgttgcagacagcaaattataccactctagggtacgatggaaagactaaatcaggtctaggcaatagttctccggcagctgagggcgtcacactacaagcggaccaagatctgttccaggagaatgcaaaaactgcggatctggtggtgtgttctgctattagttccgcaccttccaacattgcgaacaacgctaggttgctactaaaggaggatggcagggtatgtgcgatagaggcgccagaacagctggcaactgccaaatcagttctgcaggaagccggatttaccaactttttccagtttggagatagcgcctccggcgagcctgtattcctagtagggtctctggggtccggtgggaacgtcgcaggggctggtctgaaagagaaggatattgttttgatccagccggcgaacgccaacgagagcgtaacggcagtagcggaacaactaaaaactacgctgtcagctttggggtatggcacaagcatacatacctggggcattgataatgttagtaccctgaaaaataaggactgcgtcgctctgctagaagctagatcagctgtactagagagcttaactgaaaaggatttttatgttgttcagacgctgataacacaatgcaagagcctattatggattgatgccttagatgatgcccgtaaaggcctgataaatggcctaacaagggtggtaaggaacgaaattccaggcagtcagcttcaaacccttcatgtcagctctgccacgctatctcagccgaaacacttatctcatttaatctgccaattgctggacagtaaaacgtctgataacgagtttaccgtagagaacgacatgatttatacgtccagagtggagatcgacgaagagctgtcagcagagatcgacgatgcccaacacgtaggtgcagatgcgacatccttggtcccattaacaagcattgacgcgccgttgtctttaacgatgacctcaacaggaactgtatgcttcaaaagagacagcgtaccaaccgctgatttagagggggatgaacttgagataaatgtcaaggcgtcaacaatcagttctaaccatctgttcgctgatactgacgagccacttatttttgaagcagcgggggtgatagttagagtcggcagtagcgtgactaagttccagccgggggattccgtagtcacttactctctgggccttgccggccaaactctgcaaaggacgaaagccgatttctgccataggttgccctccgggtataccttctctgaggctatcagcggtgtggcagcccatgccgcagcctggtacgccctggataggattgcaagaatacaggggggtcagagcatccttatccatgctgccgcagaagatgttggacaagctgctattcaaattgcaaggaactataacgcagagatctacgcaactataaaagaagaggcagagagggagctattgtgtgggacctacgacatcccgagcgaccatatttttaacctacaggattcccatacagttgataccataaaacacatgacgaagtctagagggattgacatcattcttgggagtcctaagaatgctgcccatcgtcaaacgagtcaatgtctagcagcctttgggaccttcgtcgagatcgggttgcttgactccagccacagtaaagtgttggacgccaacttcgtcccgcaagatacaacgttttccagcttctccctttctaatatagctaggaagtccccgcaattaatggcccaaataattgctgctgttttcgagttgcactccaagggaatcaccaagcctatagcgtcattcaaagtattctctgcgtccgaggttgagagtgctgttcagtatgcgcagactgaagggcaggacaagaccataatacttagttggaacgataatgatagtgtgccgctgataggttcaggagagaggcaaccgattgacctgaaccttcgttcagatgcgtgttatatattggttggaggtcttggcggactaggaaggtcacttgcaatgatgttggctgaaaacggagcaaggaaactgtgcttcctaagtagatcaggcgctgcgtcagcgtcagcgaatgacttaattagtgaccttgaagaactaggcgtccaagttaggtgccttcaatgtgacgtctcagagattagtgcattgaagcatgctctggatacttgtagcgcggaattaggcccagtacacggggtcatccaatgcgctatggtattgagagatacattattcacgaatatgtcatatatccaatggcaggaatcaacgttgcccaaagtccagggaactcagaatttacataatgccttgcccgacgtggacttcttcgtggctctgtcaagctttgccgggacattcgggaaccgtgggcagagtaattacgccgctggatgtgcataccaagacgcgctagctctacaacgtagggatgaaggtaagaaagccactaccctagatgtaggcctaatgcgtgatattggagtcctggccgagaatgggatgactgacaatttaaaggagtgggaggaaccctacggggtgagagaaggagagctgagaaacctggtaaaattggcaattgctgggcgtctgccggcccaagtcctgaccgggttagccaccggtggctcagcggtggttgctggtattcctccacccttttatctatccgacgcaaagttcagtatcatggcaaccactgacctagaaaaagtatcagattcagccggagattccaataatcgtagaaagtccgactcaattcgtgcgctaatttccaaaagcgagaatcttgttgaagcctccggccacatcacggcgtccttggtatctagaattgcgaagatgcttcaaatagaggctgaagacgtagacacttctagagctttacatagttatgggcttgactccttagtagccatcgagattgtcgactgggctctaaaagaaatagaagcaagggtctccgtattcgacatcatggcggcagtacctataacggctacagcttcaaaaatagccaacgcatctgtcctttgctctaaggag

SEQ ID NO: 53 - DNA, 5196 bp, Artificial Sequence
  PKSC18B
atgtcatccacagcaattactaggagacatttgttgttattcggggatcaaactgttgaaaagttaacctcaataagggctctagtacgtaatgctaaaacctcaccagcagctaagaggtttttacaggagatcacagatgtgatacaaatcgaattcagtacattgagtaaaagtgagcatggctggacagggacgttcgatactctgttggggcttgccgaagagaacgacgaacaaaatggagcgaacacgctggtcagtacagttttaatgtgtatcggaaggctaggagagctggtggtacacgccgagcgtgacccaaccatcctaggtacgccggaacgtccggttgaaatcctagggttttgcacgggtctattgccagccgcagttgtggtagctgcgaaggatacgagcgaattacatacccttgctagagacatagtacaggtcactttcagaatgacaagggagatcgtcaggcagacgaaattagttgaagactccagcggcgattgggccagaacgtacattggcattacgcgtgagaaaatggaaagcattttagatgattttcatacctccaattccattcctccgacgagacagataagcgttggggttgtttctgagaaatggaccaccatcattggcgccccttcaagcttggctcgtttatcaagctggagttcagagatccagtcagcgagccacgctaagactgacattggagcccttattcatagcaaggttcttcccccactagacctggagaagatcctggctccatttagttggagggacagggtgttggattggacgaaagcgaggatgatttctccggcgagctgcaccgactatacgaattcaagcctgggttcccttgttggacaaataataaatgacatcgcttccaacgcactactgatcgatgaaaccatacaggcttgtataagtagattggacaaggctactgcttttagcgttactgtccccggtcccacgggatacctgccagccgttgaacaggctttccgttcatccaaggtacagtacgaactaaataagcaaacgacggatgccacaggaagtggacgtggggggagtgatatgattgcaatcatcggcatgtcaggtaggttccccggaaccaattcaccagaggaattttgggacgacgtgctggcggctaattgccatatcgagagtgtccctaagtccaggtgggacttggacgtattcttcgatccagaggacaaaagtactaggaagaatgcaacaaccgcgatgcacggagcctggctagaaagcccgggtttattcgacaatcgtttgttcaatatgtcaccgcgtgaagcaagtcaagccgatccaattcacaggctgctattaactacctcttatgaagcattggaaagtgcaggatatagcccggacggcacgatttccactgaatccaaccgtatcgcgtcattcttcggacagacttcagcggactggcaagacgttctgaaccaggagggtatagatatctattacataccgggagtcggacgtgccttcgctagtggtagagtcaatcatcactttaagtggggtggtacttctctgtccgtcgacgcggcgtgcgcaacaggtattgctacagtcagtctggctgtgagtgcattattggcgagggaatgtgatatggcccttgcgggaggcggggccgtgcatgtgagtccgaacacatacagcggtttatctaaagccgggatggtttccacgacggggggatgccgtacctaccacgacgacgctgacggctatgtgcgtggggaaggtgtgggggtggttgttttgaagagattagaagacgccgtagcggagaatgacaatattttgggtgtcatcagggctgcggcacagacctatacgtctacgtcttccagcatcctacatccgagccatgtctctcaagagaggatctacagagaagtccttcaccagagtgggctacaaccacaggatatagactacgtagagatgcatggcactggtacgcaagctggggacgtggaagaaatgacaagtgtcattaacgtcctggctaagaatcataccaaaaatgagccgttaacagtaggtgcggtaaaagctgttgtcggacacggtgaggcggcagccggggtcacctcactgattaaagcgctaatgatgctgagggacggactaattcccgcccagcctggctggccctttaaggtcaacagaaactttccatctctggcaaaggctaacgtcaggatagctactaaaaccttagacctaaaaccatcttctaaagcggataaaaaagctaaaattcttataaacagttttggagcgtccggaagtaattcctgtgttattgttgaagagccgccggaaatccccgaaaagcaagacgatcccagaggttttcatgtcgtaacgctttccgccagatccgcttttagtctgaaaaagaatagggaaaacctagttgattacttggagaggaagcctgagacccgtttggcagatttggcgtactcaaccacggctcgtaggatgcacgagactctaagaatcgcctatgtaggcaattcagtcagggatgttgtgaggcagctgagacatgatgccacaaatggcggacccaacgatcctaagagtaagacgaaaaaatcaccgagactattcctttttacgggacaaggttcccagtacgctggcatgggagcggatttgttcgctgctgacaagggattcgccgagctgttgggcacctatcaggacatggccacaaacctaggcttaccagaattcgtagatatcatcagaaataaggaaattgacatgacgacgaaatccccagcgcaagttcagttagccgttgtggcactggaaatcgccattgcgcatacccttaagaaatggggggtgtttccggacgcggttctggggcactctttgggcgagtatgctgcacttgcggttagcggcgctctttctgtagctgacgcgttatatcttgtgggtaaaagagcgctgcttatggaaaaacatttagaaccccacacatacgcgatgttggtgacaagcttgagtgcagaggaccttcaacaaaggatagaagaattaaagctggaatcctgcggtattgcgtgtgcgaatggacccagtgttgcggttgctagtggccctgtgaacgatttaaagaaacttgaacagcacctgctagacacaagcgacataaaaagcacatttctgaaggtgccttttggttttcattccgctcaggtagaaccaattctggaagaatttgaaaagatagctgacggggttacattttccaacactcacacaactttcgtgtccagcctaacgggcacgacagagtctagcgtatcccccgcctatctgagtagacaaacaagggaatccgttcagttcaccaaggctctggaagcgtgtgaagcagcaggcttgatagggggtaactccctgacaatggagatcggacctgatccagtgtgtctatctttagtcagaagaacacttaatattcccggctcagcaagactgattccctccttaaaaagcgggcaggacaactggagcacaatcagtactgcgcttaaggctgcttatgagaccggcgtaaatgtcaattggcccgagtttcataagggcttcaagaattccgtcaggctattggatctaccaacctacgcattcgagtataaagacttttggacgcgttaccaggaattagaacctgtccaaacgacggctccttcccctgtcgtggagaaggtacaaccacctaaatacccgggtttcacttcaaccagcagtgtgcagaggatcgagtccgagagtatccaaggaagcaaaattactgttatttattcatccgaaaccagtgaacctgccttattgcaggctattcaagggcattccgtggttggaagaactatttgccctatggttgtctattgcgacatggcgattgcagcaaccaaatacgcgtattggagactacatgacacgaaacagactcccgatttgagtatttatgatatggaaatggcacgtgcactagtcattgaagagcgtggcagtagaccggttattaacatcaggaacatatataatcaagatcaaggattcgctagagtcactttctattcaataaccccggagggtaaagaagttgcatatggagcctgcaaggtaaaagttgccaaaggcgcagcacaaaaaaatagccctcaacagctagacttcctgctacgttccagaatggtcacgttgcaagagtatagcaaaaaccgtaaggcgcatgcattccttaagccagttgtatatagactatttgcaaacgtggtcggctacggtgaagcttaccaaggattagaagaggtcgttgtggatacgagggggtcagatggaatggggaccgttaggttgccacaaagtgacagcactggccacttcaccctagacccttatttaaatgatgcagcgatccatttgtgcgggttccttgtaaattcaggtctaaactacccccaagacgacgtgttcatttgtcctggatttcaaagctggagattttttgaagctttacacccgggtaaagcgtattcaacatacgtctacatgcaagaaagtgcttcaaacgacgggagtatgctgggcaactgctacgtgcttgacggagacagaatagtgcaggaactagtaggcattaagttccagaagatgaagagggctgttcttcaactgtcacttaccagcacaggggcgcaaccccgtcacccaccgacggagacacaccgtccgaagagccccatccctcaattcagttcaatcgagcccacaacgatcagcacgacagagccccaggcgtcagacgattccgcgtctacgggcactaaaactccggaagcgagtgactcagagataattgacacactgttgtcaattgtggcgcgtgaaattggagttaatgtagaggagatgttggacgagaccgcctttatagatctaggggttgacagcctggttgcggtcacgatcttcactaccttggagcgtgaagttgggctgaaattacaagcttccttcttcgttgagcacaccaccgtgggggacgtgaagagagctttgcatgagatgctg

SEQ ID NO: 54 - DNA, 1125 bp, Artificial Sequence
  PKSC18C
atgtcctctccagatacagcagtgtccccggaagaggaattgctggcggttatcgctgaggagttaggcatggacatagatgatttaagcgacgatacagacatcagccacttacagaacgacactgcgttaagtaggcttattttgaaacgtgtgcctgtggggctgcaagatgacatcaatagaacaacctttcagtcctgtacagatatcgcggacttaaaggcacatattgacaaggtaatggcattgagagagccacctaagcagagcgacaagagaaaggccaagttgccaatcgtgttacttctgagagggaacgaggctaccgcaaagaagaaggttttccttttacctgatggctctggctccggaatggcatacatgtcaatccctccaatggaccctagtatatgcctatatggtataaattccccatacctgcacagcccggaggtattcaatgggaccattgacgacctagctcaaatctggactgccgagatccagaaagtccaaccaaatggaccctatactttgggaggatggagtgcaggtggctatttctctttcgaagtgtcaaagctgctgatctccaaaggcgaaagagttgagaagttaatacttatcgattcaccatgtagattgttattcgaagccttacctccacaggttgtagaatgtttggcaaagaacaaccttatgggtaattggagcgaggggggtacacccaaatggctagtcaacagcttcgtttcaaccattggagcagtcgaaaaatatatgcctaccccaatggtcattccggatggcgcaaaggccccggaagtgtttataatatgggcttctgaaggcgtattcccagacggagtggaggcctaccccgagctagacatgagcgttagagtcacgagatttttagtgaacaagagggttcagttcgggccgttaggttgggacaggttattccccgcacaggacattagcattgcgaagatgcccggatctcactttatgatagttcaccaaccgaacgtggatactctgggcaaattattgcgtgatatcatacagggcagaagggctgacgccaagtccgattggcaaaagtggagaaacaggtcc

SEQ ID NO: 55 - DNA, 7095 bp, Artificial Sequence
  PKSC19A
atgtcttccgcgacagcggggaacgacggtacttcaatagcgattacgggactgagctgcaggttcccaggcgatggggataacccagcggcctggagtatgataccaaaggaaaggtttaacggctacgcattctgggccgggggtaaaaaaggccacggtagtataacgaagagcggccattttctgaagcacgacgtaagccatttcgatgctaatttcttcaacatcagcgccctggaagccaacgcgatggatccgcagcatagattagccttagaagtggtgtacgaagcgttagagagtgccggttatagcgtcaaagatctggcgggtactagaacaggggtctttatgggccacttcacgtctgactataaggaacttgttatttccgacacagatggaattcccccgtacgccacgaccggtttaaataagacatccttggcaaacagaattagttggacgtttgatctaagagggcctagcttcgctttggacacggcttgcagctcatctcttgtggcattccacctagcgtgtcagagtctgaggacaggcgagtccgatatcgctattgtggggggcaccaatgttttgcttaatcctgacatgtttgttgccttctcaggacaggggttcctttctcccgacggaaagtgtaaatccttcgacgcctctggtgacggttacggacgtggagaaggggtcgctgccattgttttgaagagagttgatgatgccattgtagcgcttgacccacttagggctatcatcagggctacgggcagtaatcaagacggccataccaagagtttaacactgccttcagcagacgcccaggaagctttaataagagatgtatacaggctggccaaactggactttgaccaaaccgggtatgtagaagcacacggtactggcacacaagcaggcgatactactgagacgttggcattaagtaggacgatcgccaaaggtaggtccagtaagaataagcttgtcgtgggttccgtaaaagcgaacattggacatttagaagcagcgtctggtctagcgggagtcatcaagagtgtgctaatgcttgaacacggcgtcattccccccaatatacatttccataatccgaatcccaaaatagacttcgagcattggaatattcaaattcccactcaacttatgaaatggcccagtcaggggactcgtcgtatatccatcaacagtttcggatacggtggtacaaatgctcatgcgatcctagatgacgcatattcttatcttggagggagaggactaagaggcttacattatgttagttgggaagatcatgagaacagagaagaagaggaagaagacgacgagtacgatcctcagcccaatactcctcgtgtatacgttctgacagctcaagacagagcaggtttaagcaggacaaaaaagagcttagcgagctatcttcgtactaaaatcgacgaactacatgacgacgacagtcaagccgaaaagtatttagctgacctagcctacacgttgtcagacaagaggagcaggttgcagtggaagacgtttgctctagccagttctttagatgaacttgcagatgcgctggagtccgccgatggagggaggatagaggtcatgagcagtagcgtccccagacttggttttgtctttacgggccaaggagcacagtgggcaacgatggggatggctctgatggcatttcccgaattctcagctagtatcgaagcagcggaccttttcttaaaaaagacccttgggtgcccgtggagcgcgagggccgagatctctcgtggaaaagggaccagtcgtctagggcttgcgctatacagccagacgctttgtacggtcttgcaagtcgccttagttgatcttttgcgtaagtgggcggtcgtacctgacgcggtggtaggccacagtagcggggaaatcggcgctgcttactgtgccggctacctatctagggaagatgcctggaggattgcatactgcaggggagttgtttgctccaatatgaaaaccgcagccccggatctagaaggtgcgatgatggctgtcggtgcatctcctgatacttgttccgccttcattgagagagtttgcccggataaggtcaacatcgcgtgcattaattctccaagctcagttacgttgtccggtgatgcggctgcaattatttcactacaggccgcattgcaagaagaaaatatcttcgcaagaaagttactagtggatacagcgtaccattccaagcatatgaaactggttgcggagcaatatgccaaagcgattgcggatattcagcctagagcaaacaccacaacagggggagatgcagcgtgtaagatgtatagctctgtgacggaatcagaaattacatataaagatttaggaccagactattgggttcgtaatctggtctctcccgttaagttcgcaaccgcgatccaaaacttgatgaggccagatgctgaggcaaggtccagcggtacagacgctgtagacattctagtcgaaattggcccccatactgcccttagggggcctgcaacacagtcaatacaagctcttggtgtgaacaataagccatatcttagtgccgtggtgcgtaatgagagtgctgtggagaccacattaaatcttatagggacactgatcgcctacggcaggcccgtagaattggcgagtctaaacggcacggtcgccggtaagaataagattttaatagatctacctagttacccatggaatcacgcccagcaatattggtcagaaagcagactagcaagaggacgtaaggaccgtccagtctctgcatctagcttactgggatctccagtgcccagcttccttgagggagagagggtctggcgtggctttctaaggttgtcagaggagccctggatggctgatcacaatatacaggactctgtgttatacccaggcgcaggattcctagcaatggcgatagaggcagccttgcagggagcagacaccgctaggaaggtaaagggactgtcacttcgtgacattgagttcctttctgcgatgcttgtacctgaagacgaagaattagaacatacaatcacccttaggccacattcctcagttaccaacagttctgaggaattgtggaatgagttcgtgatctgttccagccctgaccgtaaatcactagtcaggaattgcagaggtctgataagggtttgctacgatgacagcggtgcggaaaatctgataactgaaaaagaagcacaagaagaccctggattgcttagatataaacaagcctcttcttcctgcaaagaggaacaacagcccgctgaactgtatcaaacattgacagatcttgggtacaactatggcttaaccttcgctaatataacggaggtttcagttggagacggtcagtcttgtgggtcagtcaccataccaagcgtcgggttgcatgacacgcagagaccacacgtgatccacccggctacattagatgccatgtttcacttagcatttgccgcggcgaacagcaaccaccttagtaagcttacagtacctatggtgccgaaaagcatggacgagatgtacatttctacagacatcccgtatctagcgcagactaaacttaagggttacagcaaagcgagaaagctgggcagtaggagattacttaaagctaccatcgggattgtcgacgaggaagagcagcaatctgtactggaaatttctggtttgcattgtaccgagatcgcgcaaaccagtgcagcccagaagactgcggttttggcaaggaaaatatgttccaggttggtatggaggccctcaattaattttatcacaaacgaagatatccaaagaattgtgagcatttctacggagccgagcacacagaccagcaactaccagcaactttctgaaatgtaccatttagtcatggcggacaatggtttctcaaaattcattaacatcattcaccacaccaccccgactatgcatattgtggagctggcgcaagagtctagtactttcgcccaggataagacgcttctgaaagacgtactgcagactgctaactacacaaccttgggttatgatgggaaaacgaaatctggtcccggcgactcaagcccggctgcagaaggggtgacgctgcaggcagaccaagatctattccaagagcatgcaaggactgcagatctggttgtttgcagtgccatctctagtgccccctctagcatagctaataacgctagattacttttgaaggaagacggtcgtgtgtgtgcaatcgaggccccggagcaagtggctacagctaagtcagttctgcaggaggcggggtttactaactttttccaattcgggggttccgcgtccggggagccggttttccttgtaggtagcctggagtccagcggtaatgtcgcgggtgccggtttaaaagaaaaagacattgttctaattcagccagcaaatgcgaatgagtccgtgacggctgtgaccgagcagctaaaaaccaccctttcagcgttggggtactcagccagtatctacacctggggtattaataacgtctcagctcttaaaaacaaggattgcgtttccttactggaggcccagtccgcggtgctggaatccttagccgagaaagacttttatgcagtgcagacgcttattacgcagtgcaaatcactgctgtggatcaacgcacttgatgacgcgagaaaagctttaatcaacggtctaactagagtcgtacgtaatgaaatccctggttcacagttgcaaacccttcacgtttcaagtgcgactctatcacagcctaatcacctatcccacctaatctgtcaggtcctggattcaaaaaccagcgataacgagtttacggtagagaatgatatgatatataccagcagggttgaaattgacgaagaactgtctgcggaaatcgacgatgcccaacacgcagatgcgactagccatgtccctcttacttctattgatgctcctttaagcctgacgatgacgtctactggcactgtatgctttaagagagatagcgttccgactgctgaccttgagggcgacgaggttgaaattaacgtgaaggcctccaccataagttctaaccatttgtttgctgatacagatgagcccctaatttctgaagcggcaggcgttattgttcgtgttggtagttccgttacgaaatttcaacctggtgatagcgttgttacttacagtctaggatttgcagaagcgatcagcggagctgcagcgcatgctgccgcatggtatgcacttgacagaatagcgagatttcagtctggtcaaagtattttgatacacgcggcagcggaggacgtaggtcaggcggctatacagatcgcccgtaattacaacgcggagatttacgccactattaaagaggacgctgaaagagagctgttatgcgggacgtaccacatccccagtgatcacatctttaacctacaagacagtcacactgtagacgctatcaagagagtaaataattcaaggggtatagatataattctgggcgcaccgaagaatgccgcacacaggcagacctctcagtgtctagcagcctttgggaccttcgtggaaattgggctattagacagttcacattctaaagtcttggaagcgactttcgtgccccaagatacaatgttcagttcttttagtctgagtaacatagcgcgtaaaagtccacagttaatgactcaaatcatagccgcagtttttgagctacacagcaaggggataacgaaaccgatcgctagtagcaaagtatttagcgcatccgaagttgaaagcgcggtgcagtatgcccaaactgaaggtcaggataaaacgatcatattgtcttggaacgatgacgacagcgtcccgttaatggggagcggcgaaaggcaaccaattgatttgaatttaacgagcgatgcttgttacattcttgtaggaggactaggcggcctggggcgtagcctagcaattatgttagcagaaaatggcgcgcgtaagctatgcttcctgtccagatccggggcggccagtgcctccgcaaaagatctaatttccgatttagaagagctgggtgtgcaagtgcgttgcttgcaatgcgacgtgtccgagatcagcgccttaaagaatgcgcttgacgtatgctctgcagaactaggcccggtccatggagtaatccagtgcgccatggtcttacgtgacacccttttcacaaacatgagttacgtccaatggcaagaatcaaccctgcctaaggtacaagggacccagaatttgcacaatgcgctgccggacgtagacttcttcgttgctctgtcatccttcgctggtactttcggaaataggggtcagagtaactacgcagcgggttgtgcgtatcaggacgcgctggcactacagaggcgtgatgaagggaataaagctaccacgctagatgtcggccttatgcgtgatattggggtgctagcggagaatggtatgaccgacaacttgaaggagtgggaggagccatacggggttagggagggcgagctacgtaatcttgttaagttggcgattgccggtcgtctgcctgcacaggtgctaacaggcctggcgaccggcgggagcgcggtggtcgctggaataccgccgcctttttacctttccgacgcgaaattttcaataatggcgaccacagatttagaaaaagtttctgactctgccagcgattctaataatagaagaaagaatgattcaattcgtgctttgataagcaaggccgaatctctggttgaagcctcagggcatattacggcgagtttggttagcaggatcgcaaagatgttgcagatcgaggcagaagatgttgatacctctagggctcttcacagctacgggcttgattctctggtcgcaattgagattgtagattgggcgttaaaggaaatagaagctagggtgtcagtgttcgatatcatggcagccgtccccatcacagcgacggcctctaaaatagcaaacgcgtctgccctgtgtagtaaggag

SEQ ID NO: 56 - DNA, 5199 bp, Artificial Sequence
  PKSC19B
atgtcaagcacagccataactaggagacacctgcttctattcggggatcagactgtggaaaagctaaccagcatcagagcattagtgcgtaacgcaaaaacgtcaccagccgcaaaaagattccttcaagagattacggatgttattcagatagagttctctacgttgagtaagtccgaacatgggtggacagggaccttcgacacacttctaggactggccgaggaaaatgatgagcaaaacggtgctaacacactggtatctactgttctaatgtgcattggtagattgggggagcttgttgtacacgcagaaagagatccaacaatacttggcacattagaacgtcccgtagagattttgggcttttgtactgggctactgcccgcagctgtagtcgtggcggcaaaagacacctctgagttacacaccctagcgagagatatcgtccaagtcacgtttcgtatgacacgtgaaatagtgagacagacgaaattggttgaggatagcagtggggactgggcacgtacgtacataggaataacgagagaaaaaatcgagagcattttagacgattttcatacatccaacagtattcctcccaccagacagatatccgtcggggttgtgtccgagaaatggacgacgattataggggcaccatcatccttggcgagactaagctcctggagctcagaaattcagagcgcgtctcacgcaaaaacggacattggggcattaatacattccaaagtccttccgccattagatttggagaaaattctagcacctttttcatggcgtgatcgtgtgttggactggactaaagccagaatgataagcccggcctcttgtaccgactacactaatagtagcttaggatcactgataggacaaataataaatgatatagcctcaaacgctctgctgatcgatgagacaattcaagcttgtatctcccgtctagacaaggctacgagttttggtgttatcgttccaggcccaaccgggtatctaccagcggtcgagcaagccttcagatcttctaaaatccaatatgagctgaataaggaaactaccgacgcaacgggctctggccgtggtggtagtgatatgatcgcgatcattggcatgtcaggccgtttcccaggtacaaatagtcccgaggaattctgggacgacgtcctagcagctaactgtcacattgagtcagtgccgaaatcccgttgggatctggatgtattctttgatccggaagacaagtcaactagaaagaacgcgacgacagcaatgcatggcgcttggcttgagagccctggattgtttgacaataggttgtttaatatgtcaccaagggaggcatcacaagctgaccccatccataggctgcttcttacgacaagctacgaagcattagagtctgccggatacagtcctgacggcaccatttctactgaaagtaatcgtatagcctctttttttggtcagacaagcgccgactggcaagacgtattgaaccaagagggcatcgacatttattacatacccggagtgggcagggcattcgcgtcaggcagagttaatcaccattttaagtggggggggactagcttatctgttgatgcggcctgtgcgacaggcattgctaccgtttccctagcagtcagcgcattgctggcccgtgaatgcgacatggcgttggcaggtggtggcgctgtgcatgtttcaccaaacacctattccgggctgtcaaaggccggaatggtctctacgacgggaggatgtagaacttatcacgatgatgcagatgggtatgttaggggtgaaggggtaggcgtagtagttctgaaaaggcttgaggatgcagtggctgaaaacgacaacatcctgggtgttattagggctgcagcccagacttacacttctacctcctcatctattcttcatccttctcacgtcagccaggagaggatttacagagaagtgttacatcagtccggcttgcaaccgcaagatattgactacgtcgagatgcacggaaccggtacacaagccggagacgttgaagaaatgacatcagtgataaatgtgttggcgaagaatcatacaaaaaatgaacctctaactgttggggcggtaaaagccgtcgtcgggcacggagaggcagctgctggggttacctcattgataaaagccctaatgatgctacgtgatggacttattcctgctcagcctgggtggccatttaaagtaaacaggaactttccgtctttatcaaaagcaaatgtcaggatcgcaacaaagacattggacttaaagccatcttctaaagcagacaagaaagccaagatccttataaattcttttggggcctccgggtctaatagctgtgtcattgttgaggagccccctgagatacctgaaaaacaagaggaccccagggggttccatgtcgtgacagtgtcagccaggtccgctttttcccttaaaaagaacagagaaaatttaatcgactatttagaacgtaagccagaaacgcgtctagtcgaccttgcctatagtactacagcaagacgtatgcatgagaccttgagaatcgcatatgttggaaacagtgtccgtgatattgtaaggcaacttagacacgatagcacaaatggaggcccaaacgatcccaagtcaaaaactaaaaagagtcccagactatttctgttcactggacagggatctcagtacgctggtatgggtgcggagcttttcgctgcggataaaggatttgcggaactattaggcacgtaccaggatatggcaactaatttaggtcttccagaatttgttgacataatccgtaataaggagatcgatttaacaactaagagcccagctcaaattcagctggctgtcgtagcgcttgagatagctatcgcccacactttgaaaaaatggggagtatttccggatgcggtcttgggtcatagtttgggtgagtatgctgcattagctgtcagcggggcactatctgtagcggacgccctatatttagtagggaagagggctctattcatggaaaagcacctagaaccccatacttatgccatgcttgttacttccctatcagccgaggatctgcagcaaaagattgaagaattaaaactggagagctgcgggattgcttgtgtgaatggccccagcgtagctgtggcatctggccctgtcaatgaccttaaaaaactagaacagcatctgttggacagctctgacataaaatccacctttttaaaagtccctttcggtttccatagcgcccaagtggagccgatattagaagaatttgagaagattgccaatggagtgacgttctccaatacacacacgacttttgtgtcatcactgactggcacaactgagtcctcagtgtctcccgcttatttgagccgtcagacgcgtgagagcgtacaatttaccaaggcactagaggcgtgcgagactgcgggtttaattggcggtaacagcttgactatggagattgggccagacccagtatgtttgtcattagttagaaggaccctaaatattcctgcgtcagctagactaatccccagtttgaagagcggtcaggacaattggtcaacgattagtacggcactgaaagcggcctatgaaaccggggtaaatgtgaactggcccgagtttcataaaggttttaagaattctgttaggcttctggacttacccacatatgcattcgaatacaaagacttctggactccatatagggaactggaacctgtgcaaacaacggcgcccagccccgtcgtagagaaagttcagcctccaaaatatcccggctttacgtctacctcctcagttcaaagaatagacagtgaatccattcaaggaagtaagataacggtggtctatagctccgagacaagtgagcccgcgttactgcaagcgatccagggacattccgtcgtcgggcgtacaatttgtcctatggtagtctactgtgacatggccatcgcggcgaccaagtacgcttactggaggctacacgatacaaagcaaactccagatctaagtatatacgatatggagatggcaagagcgttggttatagaagaacgtggaagtcgtccggttatcaacatccgtaacatttacaaccaagaccaaggatttgcgagagttaccttctactctatcacgccagaaggaaaggaagtcgcgtacggagcatgtaaagtgaaggtggccaaaggggcggcacagaagaatagtccccaacaacttgactttcttctgagaagcaggatggtcactctgcaagaatattccaagaacaggaaggcacatgcgttcttgaaacctgtggtttatcgtttattcgctaatgttgtcggctacggtgaagcatatcaaggtctggaggaagtagtcgtcgacacgagggggtcagacggcatggggacggtgaggttaccccagtcagatagcactggtcattttaccctggatccgtacctaaatgacgctgctatccacttgtgtggttttcttgttaacagcgggttaaattacccagaggatgacgtctttatatgtcctggatttcagagttggagatttttcgaagcccttcaccccggcaaagcttactctacttatgtttacatgcaggaaagtgcgtctaatgatggcagtatgtcaggcaattgttacgtcctggacggagaccgtatagttcaggaattggtaggcataaaatttcataagatgaagagggccgtcctgcaactgtctttgacatctacgggtgcgcagccgagaaacccgccagccgaaacgcatcgtccaaagagtcctattcctcaacaattctcatctatcgagacgactaccatatcaacgacagaagtgcaggtatccgatgattcagccagtgccggcacaaagacgcctgaagcgagtgacagcgagattatagacactcttcttagtatagtggctcgtgagataggtgtgaacgtagatgagatgctagatgagacagcattcatcgacttaggggtagattccttagtagcagtgaccatattcaccactcttgagcgtgaggtgggcctaaaattgcaggcgagctttttcgtagaacacaccacggtgggtgatgtcaagagagcactacacgaaatgcta

SEQ ID NO: 57 - DNA, 1125 bp, Artificial Sequence
  PKSC19C
atgagttcaccggacactgcggtatcacccaaagaggagttgttgggcgtaatagcagaggagctaggtatggacatcgatgacctaagtgatgacaccgatatttctgacttacaaaatgacactgcgctttcaaggcttatattgaagcgtgttccagtgtctttgcaggatgatatcaatcgtactacctttcagtcttgcacggacatcgcagacttaaaagcgcacatagacaaagttatggcgctaagagaacctccgaaacagtccgacaaaaggaaagccaagttacctatagtcttgctattaagaggaaatgaggcaacagcaaaaaaaaaggtgtttttgcttcctgatggatcaggaagcggaatggcttatatgagcatccccccaatggactcttctatatgtctttatggaataaactccccttacttacacagtcctgaagtatttaatggtaccatagacgatttggcgcagatatggacggctgagattcagaaagtacaacccaacggtccgtacacactgggagggtggtccgcaggcgggtactttagttttgaggtaagcaagttacttatctccaagggagagagagtggagaagctgattttaattgattctccttgccgtttactgtttgaagcgttgccaccccaagtcgtagagtgtttggccaaaaacaatcttatgggcaactggagcgagggcggcacacctaaatggttagtgaattcatttgtaagtacaataggtgctgtggagaagtacatgccgaccccgatggtgatccctaatggcgctaaagcacctgaagtgtttattatctgggcttcagagggagtatttcccgatggagtagaggcatatccggaacttgacatgagcgtaagggtcacgaggtttctagtcaataaaagagtgcagcttggccccttgggttgggatagattgttcccggcccaggacatttccattgccaaaatgcctggtagtcacttcatgattgttcaccagccgaatgtggatacactaggtaagcttttaggagacgtcatccagggtaggtcagcagacgcgaagtctgattggcagaagtggaggaacagatct

SEQ ID NO: 58 - DNA, 7218 bp, Artificial Sequence
  PKSC20A
atgtcatctggggccgcgaagttgaccgatgcgcatagtgtggcagttactggtctatcatgtaggtttcctggcgatggcgactcattggactccttctgggactcaatttgtaaaggcgaatctgcatggtctgagatacctaaagaacgtttcaacgtcgactccttttggtctccatcaaaaagtaggaacacaatgactcctaaaggtgcccacttcctgaaagaagatataagcaagtttgatgctaatttcttctccttgcctaaaaacgatgtggaagcaacagacccccagcataggattatgatagaagttgcgtatgaagcacttgaaagagcaggtcttccgctggagaagatcgcggggaccaggacaggggtatttatgggtcacttcacatcagattataaggaaatgatgtatcgtgaccccgataatgccccagtatacggggggactggctcctgtaccacgagcttatcagcgaggatttcttggctgtgggatcttcaaggcccgtgcttcactttggatactgcatgttccagctcattagtagcgatccacctggcatgccaatcccttagaacaggcgagagcgatatagctatcgtcggaggtacaagcttattgctaaaccccgaaatgtttatgtatttatccaatcaatcatttttagctccagacggcaagtgtaaatcatttgacgaaagcgcgaacggctatgggaggggggagggtttcggatgcgtggttcttaaaagggttgacgacgccatttctgcgggcgatcctataagagcagtaattaggggaacaggtagtaatcaagatggacatactaaaggcctgacccttccgaatgcgaacgcgcaggctgccctgatagaggacgtgtataagacggcaggactaggcttcgagcacacagggtacgtcgaagctcacggtaccggcacccaggctggagacaatgaggaatgccaagctttggccagaactatcggtgctgcacatacttctgataaccgtttgattgttgggtccgttaaatcaaacattggacaccttgaggctgccgcaggtattgcaggtattatcaaagccattcttatcttagagaccggcctaataccccctagcataaattttaagaagcttaacccgaaactaaaatttgacgactggaaattacaggtagcaaccaaactaacaccttggcctaccgacggagttagacgtatcagcacgaattcatttggctacggcggcaccaatgcacacgcggtactagatgatgcggcgtcttatctgaaggcaagaggaatttctgcggtccatcagacgatcttaccacacccacaacatgctcccagcgttattggtttaaatgatgattctgcacacggcaaggcgtataaggatagaaccggaagtaggttattcgtgatctccgcccaagacaaggacggtcttaaacgtgtcaaggaaccactggccaaatacgtggaagcaaaagggtctgaattggagaccgggtccgaggaagcagaagagttcctgtcagagttagcctacacgctatccgaacgtaggtcccatttgcaatggaaaacctatgccgttgcgtccagctcagaggacctgtctgatgtactaaaaagcgacgaaaatcccgcattagtcgcccagtcatctagacagccttccttggggttcgtcttcaccggacaaggagcacaatgggccagaatgggtatggaattaatggcataccgtgttttctatgagtctgttcacgctgccgatacatatctaaaggaagtctgtgaatgcccatggtctgctgtagaagagttggaaaagggcaaatctacctctcagcttcacttggcagaattctcacaggctttatgtacagtcctgcaggttgcgcttgtcgatttgcttcgttcatggaatatcagaccaaatgcagtcgcaggacacagctctggtgagatagctgccgcgtatgctatgggggctctgtccaatgaagatgcgtggcgtatcgcgtactataggggtctactgagcacggaaatgaaagctaatagtccagacgttgatgggtccatgatggcagtaggtctaagcccggaaaaagccgaggcttggatatccaaggttactgcgggagaattagtggtagcgtgcataaattccccgactagcgttaccataagtggggacactccaggtatcgagcaacttctggagttactacaggcggaaaacatttttgcgaggaagttacaggtcgacacggcctaccacagcccccacatgcaagcagttgcgcaagactactatgagctgcttgcagacatagtgccgaagacgcccaccggtgactgtactatgcacagcagcgtaattggtgaaataatacgtcccgaacaattgggagctgttaattgggttcgtaacttggtgagtcccgttaaatttagtactgcgattactgacatgctgcgtccggtgaaggacggagagagagccagcgagaatgccgtggacctgctggtggaggtggggccacatgcggcgctacagggccccgctacgcaaagcttaaaagctcttaacgttatgaatataccataccaatctgtaatcgttcgtaataaaaacgcggtggagaccgcgcttaatctagctggctccctgtttgctcaaggctacgctgtcaacatacaagaagtgaatagtgacgggaacaagcagttcgccaagccattagtagaccttccgacctacccatggaaacacacgcagagatattatcacgacgtaagaatagagaaggaatatcttaacaggaagcagcccaaactgtctctgatcggagcacctgctccggctgttggcgagcgtgaatacctttggagagggcacattaggcttagcgaagaaccatggattggcgatcacaagatccagggagcaatcttatatcccgcagctggatatctagccatggcgcttgaagcggcctcacagataggtgacgagactaaaaagatagccagctacacgctgagggatatacaacttacctccgcggcaataatcagcgaggaggcagacctagagtgtattgttcaattaaggccacatatttccagcaccagggatagtagttctagtacatggacggaattcacggttaccacttctccagacggctcttctttagtaaagaactgtagcggtttaatatatatcgactacgaggtctcagtcgataccgatgccgccaacgaaagggatatgcatttgagctcacagaagagggaattcgagcaggtgaagtcatcctgtgacaatcgtataaattgcacggagttttatgcggatcttgcgacaatgggattacagtatggcccagctttttctaatgtaagagaagcccgtaacggtaatggtcaaagttacggcgtcgttgagatccccgatgttgtagggagggtgcctaccggatctgaccgtccgcacattgtacatcccggcaccttagacgcagtcttccatctagccttcgcagctgtaatggatgacaacgcccttaccgccatggttcctaagagtattgatgaggtccagattagtgcatcagtcccatggacaccaggagtcaagctgccaggtttcagtaaaagtgcaaagcacgggtttagggaactaaaagcggatatcgtaatgcttgatggcgaagaggctgcgccggtcatgtcaattcaaggatttctgtgcgccgagatttctgggggaagttcaggcgctgcccaggccgcccccaagagtattacctcccaacttatttggagacccgctctagggttgctttctggagaagaggtgggaaaagtgctggagaaatttgagggtgtcgagaaggtggtagagtatgtacaattagcgcaccatgagaatcctggactatccgtcctagaagtcgcggccgcagaccaaagcgccttattcgcacgtaacgacttgaaggttgtctccaagactgcgaaggtcgatattgtcgcacctagtgacgaagtgaaagcaaaaattgaagaaagcggccccgacgctgttgtccagagtgttgacttgactacgaacgttagtaaggaaacttttcaggatgcaacctttgacctgatattattgacagacattgccagcctaacgaccaatccgtcaacggttctttccaatctaagcagaatcttaaaacctacgggtaaattatgtttgttttccacaacaactacacctctgcaaacgaccctgactgcgacaaaaacttttcagccgacgacaacggtccagacgcctaccacacaacttttgatagccaaacctacgtcccatcctcctcccactaatggcgtgacgaatcatccgagcagcagttcacctacgaccttcaccttattgacccatccaaatcccacacccgcgacgactagtttaattacctcattaacgacgacgctgtctacccactcccttacattggaaactcttccatggaaccctaccaatactaacccatccacattagctaacaaaaccctaatctctctacttgaactggaaacgccgttcctaagtactttgtcacccgcagattgggagccgctgaaggcaactcttttaaccccgaccagcgttttctggataactggctttacgagtcctgcagcctacatgattgacggactgacacgtgtagtcagaaacgagaatccaggaggagccaagctgaggacctttcacacacacccaagctctttgttaacaaatccttcactgttagcgagcctaatagcgaaaacgctgttggagcatgccgtagatgatgaaaccgaattcgttgtcgaagacgacgtagtaaaggttagcagggtccacgaagatgtagcgttaaatgacgagataaacggactgttacctggagcgggtgcggccaagaatgtggtggatatgaagctgaaagaggtgccacacgcagttaaaatggtagtccagactccgggaatgctagatagtgtagctttggagcgtgacgagctagaaggcacagaactaagggataatgagatagagatcaaggtggttgcgtctagtatcaactttagagatgtcatggtctcacttggtcagatcccagacagtaagctgggttttgacaatgccggcatagttaccaggactggctctttagtaactaagtttaaaccaggagacagagcttgtatgtatgggcacggcgcccacagatctcttcaccgttcccgtgaggactattgcgcgttaatccccccgtcaatgactttcgaacaggcatgtactgtaccaggtattcacggaactgcctggaacgcgctagtaagattagcacgtgtacaaaaaggacagagtattttaatacacgcagcggccggaggggtcgggcaagcagcgattcaagtggcccaattttatggcatggaggtattctgcaccgttggttctgagcgtaaacgtcgtctgctaaaggaggagtatggtattggggacgaccacatatttaattccagggacctatcctttgttaaaggcgtcaaaagaatgactggtggaagaggggtcgatgtcgttttaaacagcctatctggggaggcgttgagacagacctggcattgtatcgcaccgttcggttattttgtagaaataggtcttagggacatattggcaaatacaggtttggacatgcgtcctttcatgcaagacgcaacgtttagcttttttaatctaaatcatattgagaaagcggcgccacatgtcatggcagctataatcgaaggatcatttgatttcttcaggaggggaataagtcgtcccgtgactcccttagtaagctaccctgttagcgacatggagtcagcatttcgtctgatgcaagcaggcaaacacgtgggaaagcttgtattcacatggggtgacgaagatgtagttcctgtaatccagactcaaaagtctgttaaattggatgcaagcaagagttatattttggtgggaggtttgggtgggctaggccgttcattaagcatgaagcttgtcgcattaggagcccgtaatatcgcatttttctccagatccggagcaaaatctccggaggcgcaacaactggtggccgacctggagaagcaaaacgttaacgtcagagcatacatatgtgacgtaagtgacgaagcagcagttcaaagctctatcgcacaaacgacttctgatctaggtccaattgacggcgttttccaatgtgctatggttctaagggacactttattcacgaatatgacttacacccaatggaccgagtcaacgagacctaaggtccagggatcatggaatctacacaaacatctgcctgcgaacttgagtttcttccttactttgtcttctttcgccggggtgtttgggaacagggggcaggctaattatgcagcggccggagcatacgaagacgcgttagcacaacaccgtaggtcagagggtaagcatgccacgacccttgatttagggattatgcgtgacataggagttctagcggagacagggataaccgatgccctaaaggactgggaaaagccatatggcattcgtgagaacgaattccatgctctgatggaacgtgccatagacggagacgtaagaggtacaaccgcccctcaagttattactggacttgccaccggagggtcagcagtagcggccggtattgacgcacccttttaccttgaggatgataggcgtttcggtgtcatggcattgatgggtcttcgtgagcaatcctccagtagctcatctagttcctcttctgctcccgttcacactttaatagcaagtgcgtcaagccttgaagaggcccagaatgcagtcacagaagctttagttaggcaagtggccaaaatgctgagtatgccagtagccgagatcgatcccggaagattcctgcacagttatggtatagattcattggtggccatcgaggtggtgaactgggcccttaaagaatgtaaatcttctgtgactgtctttgatgtattggcgggagtccctatgaccaccttgacaggaaagatggctgctaaaagccaggcactgaaacgtgagttagcccccatc

SEQ ID NO: 59 - DNA, 6066 bp, Artificial Sequence
  PKSC20B
atgagcagtaccatcccaaatagacctacaaatttggtcttatttggtgaccaaacagtagagaaaaggactagtatacaaaccctagtccgtcacagtaagacctctcacgcagctagaagattgttgcaagaagctacagacttagtacagctacattttaataggctaagtgacgaagacaagcagtgggaccatgaaatccacactttattaggattggccgaggataatatcgcagaatccaaaccgaacggtgccatagcaactgtattaatgtgcataggcagattgggcgaactgctggtttatgcagaagaagatccctccattctagggtcagaaaatgatccagtcgaggtactggcattttgtacggggctacttccggcagcagcattagtagcagcaagagatactagcgaactgttcgatttggcaaaagagattatagcaataacgcttcgtatgacgcttgaaatgcacaggcgtattataatgatagaggacacgaatctttcatgggcaactaccttggtcggcaagacgcccggaaaagtacaacccatcctggacgaattccaccaaagtcagcacataccgtactcaaagagaattgccattgctgtcgtgagcacgggatggctaaccctgataggggcgcccagcagcctgaggcgtcttatggagttctctaaggaactagaggacgctcctaaaatgaaaacagaaacgaatggcgctgttcacacacagtacatgccgacatacgatctggagaaggttctaggcaacagcccgttactggaactgcccataacttccaaagcacgtattcacagtcccgcaagctgtaagcaatatacccatacgacattaaggagtttaatgagtgaaattttgcctgatattgctcacagaatactaaggatcgacgatactgctgaggcctgcatttcaaaaatcgccagtgataagccattggtaatgacagtagcgggtcccacaggacatcagacagccgtggagaaagttttgaaatcaaaaagtatcaaatatcagataaaagagcatcgtagggccaataaggattctggaagaggtggaagcgactctatcgcgatagtcggaatgtcctctagactgcccgggtcagacaatgtggaggccttcttcgagtctcttctagagcaacaagtgcaaattaaaaaaattcccaagtccagatttgacttggagacgtattacgatccaactggtgaaagaaggcacactaccagtacggatcaaggagcttttctagatagaccgggatacttcgataacaggttattctccattagtgcgcgtgaagcggctcaaatggaccccttacaaaggatgcttttaactaccagctacgaagcgttagagatggctggctactccaaaaatgctacccccagcactcaagataatagaattgccgtttatttcgggcaggccgccgatgactggcgtggcgtactgaacaatgacgaggaaatagatatatattatgtaccctctctttctcgtgctttcggccccagtcgtgtctcttaccatcacaaatggggcggaggtacttatgcattggatgccgcctgcgcaacgagcacaacagcgatacacttagcctgtaaggcgctgtctagtcgtgagtgtgataccgctctagcggggggaggcagcttatgcgtaagtcctactgctttcgcggggcttaccaagtctgggatggtttccgaaaaaggtgggtgtagaacatatcatgatgatgctgatgggtatgcccgtggagagggcataggggtagtcgtgctgaaaaggctggaagatgcaatcgcagaaaacgacaatatcctaggagttatccgtggccacgcccgtacctacacatccacttccacgtccataacccacccttcagccgaatgccaagctagggtgtacgaggaggttcttaggcaaacaagcgtggtaccaaatgaaattgcgtatgccgaaatgcacggcactggtacccaagctggggactatgaggagatgtccagcgtgattagagtgcttggtcaagacaggtctaagaagaacgtattaaccgtaggggctgtcaaagcaaacgtagctcatggcgaagcggttgctggcgtgacctctcttattaaggtcttgatgatgatgaaagagaagaaaattcccccccaacccggattaccttttaagctaaacaggaaattcccgaggctggaaaatgtcaatgtaaggatcgccgggatcggcaacaaggaccttactttaaagccaagccccgcatcctctgacggtaagattaaatgcctagtttcttcattcgatgcgagcggtggtaatacttccttagtggtcgaggaggctcctgctgttgccaagaaaacggaaaatcccttaccggcccatgttgtcacaatctcagcgagaacttccttcagcctacaacagaatagaaaatcactgttggactacttaatgaggaacccacagaccaaactggcagacctagcatactcaaccaccgcgcgtagaatgcatgaggttctgcgtgtcgcgtattctgggaagaccaccaaagaaataataaactcactaagggaggatgtgagctccaatggggccaaggatcctaagaaaaaggccctagcttctagtgtggtattcgcatttacgggccagggttctcaatacgccggcatgggcagacaactgtatcaacatagtgcagagttaagagcagctcttcaaaattacgagcagatggctgagcaccaagggttacccaagtttttgcacctgattgcagatgaaaaagtagacatcgcggcagccagtgccacagaggtacaattggctgttgttgcactagaaataacgaccgcgaaattggttgagagttggggaatcaaaccggactttgttgtggggcactccttgggagagtacgctgcattatgcgtagcgggcgtgctgagtggatctgacgcactttatcttgttggccgtagagctcaattgatggagcaacagctaacggccggcgaatatgctatgctggcgatctcaaaggacgccgattccgctagaaagctgcttgccgaacaggccaatgtggctggaaaaaccgccgttgcatgcattaacgcgcctcaagttacagtggtttctggtcctgtaaaagaaatcgacaaccttaaggttcaacttgaacgtgaaggatcccgtgcaaccgtgttaaggactccctatgggtttcactcccaccatatagagccaattttggacgcatataaagcaatagcccagggtgtaaccttcgccgccccgaccatacctgttgcttctaccctactgggaaacatagtcgaaattggcgacacttcagtattttcagcagattacctggtcaggcaggctagggaacaggtgaattttacaggtgctttgcaaagtttgcagaacggtacaggtgctaaagttcagtcaacgttcgtcgaaatcggaccagagccagtttgcctgggcctagtcagacgtactctagacattcccaccactcgtctgctacccatgataaaatcttccgaggacaattggtctaccgtgagctcagcgcttgctagtctgtaccaggctggtgcggacatcaaatggagcagatatcaccagaacttcgtaggcagcctacgtctgctgcctctgcccacctatgcgttcgacgaaaagaatttctggaaagcattcgtagagccgataaaccccgggcttgctttaccggcaccatcaaatgcgctggaaaagtcatcaaagatcccagtagcgccagcattcagcactacaactttgcaatggattgaatcagagactgtgaccgacaaaactaccagtgtagtttttgccgcacatactgccgagccccacctttatgaagcgattaaaggacatgttgttaatggggtcaccctgatgtccttgtctatcttctgtgacatggccaagaccggggtgcagtacgcatatcagaagttagtgccgggaagtaaggtgcccaagatgtcagtatacgacatgaacatgacacacgctctagtggtacctcatgcagaccctgaacaaatcgtcaggacgaaggtcaccctttcacaaggcgagaactttgcacatgtgtcattctcttctacgaagaagggttcctcaaccgaacatggagacgctaaaatagtgtttgaggacagtgctgcctttttcgccgagcagtctcaaacaagttttctagtctcaagccgtatcgacgctttgaaggacatgagtagcacaggcaaggcacaccacttattgaagtcagtggcctataaactttttgacaaccttgttgcttacgggaaaaattatcaagcgatggaagagttgtgggtggatgaatatagtagagacgcggtctgcacggttaaactgcctaatactgcaggttctggcaccttcacgcataatccgttttgggcagacgcagccgtacatctggcagggttcctagtgaatagtggtctgaaataccctgaggaaatagtgtgcctgtccactggctttagtagttccagactaattgaggagctacagcaggatgaaacttataccacttatgtgacaatgcaagataccgagacgccgaacatacttactggttctgcgtatgtttacaacgggaagatgaaacttgtccaggtatccaccgtcttaacctcaattttaggcggatccgtggcggcaagagcaactccgtccacctcagttcccttaccccccgtcgaaaaaacagtcgcgtggcaaaaggatttgttggcggtaagcaacagaacgcgtccgagcacaggcttctcaacgccggctacacaagtgactgactatagcttttctgaagcgggctatcgtagcggggttagcacgccggccacaagcatcgaaagtcccccagcctccgcgaagccggacctttttgcaaaactacagaacatcgtgatcgcggaaagcggttgctccgagtccgacttggagccgggagcgagtttcgcagacttaggcatggatagtttaatggccataactatattggcgacctttcagaaagaaacgggcgtagaacttcctccgacgtttttcctggatcatcagacagttgccgaagtaaaggaagccttgccggggggagatagtaatgaggccaagggggcatctccggcagatagcgaggatgagactgaagcgactccgaaggcgatcttgttgaatggcacgcctggatccactacaacacaaagtgtctttttacttccagatgccagcggatccccgtctaggtacatccaactgccctccttcggagactccctatgtacatacggacttgaatccccctttttgaagacgtccctagcggaagctatctacagtgtccctgaactttgcgtctcattcgcgaatgcaatacaggacgtccagccccatggtccatacatacttggcgggttttccgtcggggctctttatgctttcgaagtagctaaagtgttaagcgggcgtggtgaggcagttgagaaattactactggtggacatgagcgtaccgtctcataacacgaacgtaggagaaattgacctagccacccttacagcggctgggatgcttccgacacaggggagaatgctagcgtcccaaaaagaacattttgtgtcagcactgagagcgcttgcagcttataaagcagtaccgttctctagtacggataaacgtccccagaaaaccactttggtaagtagcaacgctggcctagccgttggaaaaacgagtgatctagcatgctgggcgcaaggcgcttcagagggagttgcgagaggatgggcagctttgctggcgggcgatgaggttgtggaagtcaaagtagacgctgagcattggtctttgttccgtcatccccatgtctcattatttcttgaagtcataactctggagatggtt

SEQ ID NO: 60 - DNA, 1212 bp, Artificial Sequence
  PKSC20C
atgtcaagctcaactacgtcaaagatctttacaataatcgctacagagataggaatcgatgcctcagagttagaggatgatatggaatttaccgaacttggtgtcgacaattttctggctaaaagtatattggcggagatcgctaaagagaccaggctgaacctaccttcaaccctattcgcggattaccctacaccagaggacctaagggcccatttagccactatcacgccggcaagaaatacgacgcctccgcaacctttgaggagctccctaaagccatccaagaacggttacacgaacgggtacaccaatggtcatactacaaacggctacacaaatacaacgcctgcacccccaaccaccaaaaccccgttgagtattccattacaaaccccacctacagccatacaaactcttttcttacttccggatgggtcaggctccggcatggcatacgcaagattgcctccgctttctcctagcatcactctaatcgcacttaacagccctttcttgaagtcacctccgtcctcaacgacgtttacccttccgtccttgtgcgctttatttgccagtgaaattcagaggcttcaacctcacggaccgtactttctaggaggctggagcgcagggggctactattcctttgaagttgctaagatcctaagggagaagggagaagagattcgtaaattagtgctaatagattctccttgcagactagtctttgaggcactgccaatgggggtagttcgttggctaagtgcgaaaggtttaatgggtaactgggggccagccggcagagggccaccagcgtggcttgtcgatcatttcgaagtttcaatacgtgccatcgaagggtatgcccctgtagcgtttcctcaaggcaaaggaggcgaggctgacgagatggaggtttttctaatttgggccgagcacggagtgctgagagatggtgcggagagaccccaaaaaggtgagttggacatgaaggtgcgtataacggagatgttattggagagacctgttgtccgtggggctcagggctgggagcgtttattcccagggagaaggttgagagtcgctgggatgggaggcaatcattttacaatggtatatccaccccatgtttcagtacttttcttctcccattttccggtatgctttgaggtcgttatatggggagacgaatgcctgttagtagtgtgt

SEQ ID NO: 61 - DNA, 1374 bp, Artificial Sequence
  PKSC21C
atgtctagcctgcgtggaacatcataccctgccactcaagaacgtgtggccccacgtgatgacactgaaagcctaatatcctcaatgtggagcgaacttctaggacacgaagatttcggggtcaccgacgatttctttgctgtgggtggacacagccttttggcaacgatcttgttaactcgtattaggaagaagacaggacttagcctgtcattgagaaagttgttggaaggacccagggtagacagattagctgctagtgtaagagaactgagaaaagagactgatgatcaggcgagcgacttactgttaactcttaggcagggtatgcccggtggaccgaggttattcttagtgcaccccataggcggagacgttctgtgtttccgtgaggtagcaagcgcgttacctccggaatttaccgtaataggcgtgcgtagccctggacttgatggtgggactgcttttacgtccgtccaagagatggctgcagcctacttgcacgaggtccttaaagttcaaccagagggtccgtaccattttgccggttggtcaatgggaggagccgtagcatatgagatggccaggcagttatctttcgagggagtcagaactgcaagcctagttttgttggacagctatgcgcctgggtctaaagcgtttgaacactttgcgggacctgatgcggacagggtagcgtcctttacgagagatttggagcgtatgaccggcgagcgtgctgatactgcactacttactggagagcgtcctgctgctggcgaagagcaggaggcgttacgtaggcgttttgctgtgttcgatgcgaatgccacagccttggtcgattataggatgcgtagggcacgtctaagggacacgaggcttacgctagttcttgcaggtgaccaaacgagacccgagggaacatcaccagcgcttggttgggaggaggctttagggacgccagtcgaaaccagaacggtcgctggagcggatcactttacgctagtacaaaggagtcatgccgcagccacagccggtgagattgcgagagcagtagtgcccggcacagctggtcaggacgaaggacatggacccggtgacgtagtagcagtaaggggtgggagaagcccggagacggttgtggctatgcttggcgtgctgagagccggtgccgtgcttgtgatgattgacgtcacgcaacccgaaggcagggtaagtgatgtgctagagagggctagaccgagtttgcttgtagacacgacagatagaacctgggaccctggacacggtacgacaccagtagtccgtctagctgaacttgagcagagtgcggccagggacgtggaacttcctgtcgtaggggctgcagct

SEQ ID NO: 62 - DNA, 1095 bp, Artificial Sequence
  PKSC22C
atgtcaagtttaaggggcacatcattccccgctctacaggagagggtcgctccgagagatgacaccgaaaccctaatcacttctatgtgggcggaactactggggcatgaagattttggagtgaccgacgatttctttgcagtaggtggacactcccttttagctaccattttgcttaccaggattcgtaagaagacggggctgagcttgtcacttcgtaaattactggagggacctagggtagacagactggcagcatccgttaggcaattgcgtgaagagagtgacgaccaagcctcagaactacttctgactttgcgtcaggggtcacccaaaggggcaagattgtttttggttcatcccataggaggcgatgtcttatgttttcgtgaagtagcatctgcattgccggctgagtttaccgtaattggagtacgttctccaggacttgatggcggtacagtgtttactagcgtgcaggagatggcagcagcgtatcttcacgaggttttaaaagtccagcctgagggaccatatcattttgcagggtggtcaatgggaggtgctgtggcttacgaaatggcaagacaactgtcatttgaaggagttagaacagcatctttggtgttgttggacagttacgcccctgggagtcgtgcttttgagcactttgcaggaccggacgcagatagggtcgagagttttgcgagagatttagagcgtatgacaggtgagggtattgatacagctttactaagcggagacaggccgactgcaggtgaagagcaggaatcccttagacgtaggttcacagtctttgacacaaatgcaacagctctggttgattataggatgcgtagggcacgtcttagagacactagacttactcttgtgcttgctggggatcagacccgtccagaaggtacgagcccagcactgggatgggaggaagcactaggcactccggttgagaccaggactgtccctggtgcagatcactttactctggtccagcgtagccacgcagcagtgaccgccagagagattgcccgtgcagtcgctccgggtactgctggtcaaaacgagggacgtggc

SEQ ID NO: 63 - DNA, 1104 bp, Artificial Sequence
  PKSC23C
atgagctctgcagttaccgtctggcaggatgcattgaatattatagcacaggaatctgggttggagccagcggagataatcgagacagacgacactgcttttctaactttaggtatcaaccaaatcttagcaacggccatccttgcccatctgaggggcccgaggggagaacctctgccccgtgacatattcgaccaaaaaccaacggtcggtgccttcagaaggttttacgagacgccgatacatctggatattgctcctgttgcggcgccggcgccaccaaaattaaaaagggtcccctccagtagtgtcccgttgtctatagttttgcagaataatccagcttccagcagacatgctgagaagacgaacatcttcttactacccgacggtagcggttctggaatggcttacgtggaaatgccgcttattgacccaagcactgtttgtctggtggccctgaatagtccttatcttaacagagcctccgagtactgttgctccatcgaagaaattgcgagagagtacgtacaggaaatcaggaaaagacagccgcatggaccatacgtattagggggttggtcagccggagggtattactcatatgaagtagcctgcgagttaattaggcagggcgaacgtgttaagaaacttatcctacttgacagcccttgtaggccagacttcgaagagcttcctatggaggttgtgcaatatttatcaaagaagaatcttatggggaattgggatagaagtgctcgtcataccagtgtgccctcttgggtcattgaacactttagaagtactttgcgtgcggtaagggaatacgttcctgtacctatggacgccgccgacgcgcccgatgaagtttgtatcatctggtccagagagggcgtcatgcctgctaatcagctaaggcgtaccgggctagacttgagagtcagagtggcgcgttttctgcttgagggaaaacccgatttgacatctgcttacggatgggatcgtctattccccggtgcacacatttccatctcctcaatatccgggaaccattttactctaataaataagccaaatgtctcagtctgtagtttcccagaataa

SEQ ID NO: 64 - DNA, 5907 bp, Artificial Sequence
  PKSC24B
atgagctctaagttacgtgtagctaatttcctgctatttggagaccaaaccgtcgaaaagctcccagctattaggcacctagtttcccacggagcgtctagcccccttgtccaacgttttctgaggcaattgtgtgacgctgttcagctgcaggtgtccaagttacctctacattctgagcaaaggagtaacattggtaatttcgacagcatcttacgactagccgaaaacaacgcgaggctagaggaaccgaacgaaattatagcaactgtcttgatgaatattgcccgtcttggggaacttatattatatgcggaacaggacccgacggtactagcatccaaaggcaatcgtaactgtatcctgggtttctgcacgggtgaagtcgctgccgcggttgcggcggtggcacaagacacgaacgaactggtggagcttggcgtagaggtaacacacatcatctttcgtatggccagggagctgaatcgtcgttcacttatggtggacaggacaaatgggccctgggcaaggacgatcctgggtatatcagtagaccgtgttagagagattctacaggactttcacgaaaaccagtctatccctagagctaggcaagtttgtatcggcttcgtctccgacggctggctaactttgtttggcccaccaacgacactgcagaggcttttagaatggagtgccgaactagaggatgccccacagatagataccgacgcgcgtggcggggtccatatggagaccctaccagaagtggacccggaccgtatacttggatcaagtccgtggttagacagagccccggtacataccgcaacaataatcagtccctatacgtgcaaaccaagacagcaaaagacactgagagggttactagaagaaattattgcagacgtgggtcagaggacgctaaaccttgcgacaagcatgaatgctgcccttgaattagcgcaggcggacaagatccgtcttgtgatgccagggtatacgtctcacgacgtgtatttccaaaagttacttcagaaacgtggtatcgaatacagtgtcatgtctcacggggaccatctgtcatcaggcccctcccgtcagggttctggtctagtggcagtagttggtatgtctggaaggttccccgggagtggagacatcaacgccttttgggagggactacttgagggtaagagatacattcaggagatccccaacacacgtttcgacctagaacagtggtatgatgcaacgggaaagcagaagaatagtacgatggcacgtacgggtgctttccttgataaaccgggcatgttcgataatcgtctgttcgacatgtcacccagggaggccatgcaaaccgacgtgcagcatcgtctgctaatgacgacaagctacgaggctttggaaatgtcaggttactaccctgatggcacgctttccacgaacaaagacagagttgcatcatttttcggacaaacgagtgacgattggcgtgaggtcgttgttcatcaaggagttgatatttatttcgcgacaggttcctgccgtgccttcgggccgggcagattacatcatcactttaaatggggagggccgagctattcagtggattcagcatgtagttcaagtatcgctgcggtcggattggcttgtagtgcgttgcttggtcgtgaatgcgatatggcactagctggagggggtagcttactgttatcacctagcccattttccggcctgtctaggggtggtttcctttctgctcacggaggttgtcaaacattccatgataacgcggacggttatgtccgtggtgagggagttggggtggtcgtattgaaacgtttggaagatgcgttggacgaccaggacaatatcttgggggtagtacgtggcagtggccgtaactacagttctgacgccagctctatgatgcatccgtctgccaacgcgcaaaagaagttgtattgcgacgtattggagcaatccggtgttgaggctaattccatctcttatgttgagatgcacgggaccggcacgcaagcgggagacttcatggagatgtcctccgttttgtctacttttgctgaaaagcgtggatcagataacccccttatagttggggcgttaaaagctaatatcgggcacggtgaggcagccgctggtgtgtgtgcgttgataaaaaccctaatgatgcttcaatcccgtcaaataccaccacaacccgatttaccagggcccattaatcatcgtttccctgatttggcagccaggaacgtatatattgcagcacgtaatatgagattagaagcctcccccgtcgcaaaggggaccctgagagtctttctgaatagtttcgatgcatctggtggtaacagctgtctgttattagaggaagcgcctccccgtgcggtgaaagacgctgaccccagggggcaccacgtcgttactttcagtgctcgttctcagaaatctttgatctcaataaaagaaagatatctggcgcacctaagacagcatccgggaaccaagctggcagacttggcgtactctacaagcgcacgtagaatccacgggcttcttcgttacgcgatagctgccagcagcatcgacgaagtcgtccaatgtttggaaacagacttagcccaaggcaagacccctagacagcccccagccactccgaccgttgtgttcactttcaccgggcaaggagcacattatgtcggtatgggggcaaatttgtgggagacatctgcgaccttcaggaacacacttcacgactaccagacgatggcgtctgcacaaggactaccgcatttccttcacctgataaccgactcatctacacccgcgccccagtccggtccagataccgtacaagttcaacttgctatggtgtcactggagttagcactagccaaactgtggaggtcatggggtatacagcctgctatggtgttaggacattctttaggggaatatgcggctttatgcgtagcgggagtcttgtctgtctcagataccctttatctagtagcgaagcgtgctcaaataatggcgggcgcgcttacgccacatgaatacggtatgctggcggtaaacctttctgtggcagacacgcgtgaggtgttgagttccgggcagcatacgagctgcgcggtggcttgtatcaatgctccgaaaatgaccgtggtgagtggtttgcgttccaaactggacgatctgcaagaccagttaaagtccgatggtactcgttgcacgcccctttcagtcccctatgggtttcatagctctcaattggaccccattctgggccaattcgaggaagcgtgtcaaggggtcacattttccgcaccgaacgtacctgtcgtctctacccttttggccaccactgtgagagaagaaggcacttttagtccggagtatcttgcccgtcaagcgcgtgaacctgtggactttgtcggagcactgggcgccgttcaagagcacaaattccccagccttacattcttggaaatcggtccagatcccgtatgcagcggcttggtaaatgcgacccttggtgcggatgaagcagccctaaggtgcgtcgcaagcatgcatagaggaaaagctaactgggcgtcaatctcctgcagcctgagggatttatacaccgctggcgcggcgattgactggcctgctcaccatagagatttcaaatcctccgtatcattattggacctgccgaagtactcttttgacgaaaaagagttctgggcgtccttccctgatagggatttacagactattggggatgtcgagacaaagcactctcaaccccctgcgattgtgcccagcgtccagggttactgtactaccacgcttcagagaataacccgtgagactatagagccggatggcctttcagtcacattcagttcagatcttgcagatcaacacttgagggccgccgtaaggggccatgcggtcgccgatgtcgaaatatgttcaagcagcttgttgctagatatggctctaagtgcagcacaatatgcgtatatgaagcatagtccggggcaaaagatgccggtgcccttaacagtcaggaattgttattttcacaggggcgttgtgctaactgataaagctcagacggtggaggtcacagtcaccttaacaagttccgcgaagacagctgacattagataccattgcagaacacctgatgaatattacgaggtgggagcctgtcaagtggtactcaagccagcttcgaagccggaccaagcggggttcctagtacgtagcaggatggcggcccttaaagcaagcgcaagtcacaggttagggaggagagcagtatatagattattcgataacgtagtcagatattccgaacaataccagggattggaaaacgtccacctaagtgaagatatgcaagatgcagtcgcagagattaacatggcccaggtgccggcggctggtggtcactatctgcaccaccccttcctgttagactcaatcgtacacttgtccggtttcttagtgaacaacgggttgaggtactcaagcgaatgggcctgtctttcaaccggctttgacgaatggcacctattgaagccactggacccgacaacagtatatacgtcatacacgttcatggaagattccagaagtacctctaatttagtcacgggcgatgtctatgtatatgatggggaggaattagtgtcagtcctgaccggcttacaattccagaagatgaaaagaactgcccttacacacctgctttcaccaccgacgattggcaatatggcagctaagccgagcaccagaatgccgacgatggcgcagacggaactactgccagtccctacgcctcctgctactgcctccgttgatgacggcgagggtgaaaaatttgatcttgtaaatactttgttctccattattgcgagggaggtcggtgttgaaccgtctgacctggagggggatgttaacttggctaatcttggcatagatagcttaatggccatcacaatcataagcgtgatgcagcaagagactggggtcgagttacctggaaccttcttcttagataatgcgacgacgaccgcagtaattgcggcggtaggcaataaaaccgtgttcttattgcctgatggctcaggttcagcgatggcatatgcaaaccttcctcccgtgcatccggcggtgtgtatcgtcggtatgaactccccttatctgagggacgcaggcagctataggtgctcagtggaagacctggctagtcaatgggtcagggaagtatatcgtaggcagcccagaggaccatacatcgtagggggctggagtgcaggtggctattattcctacgaggtagcaaagagactactgcaggatggccacgctgtagcgaagttgattttgattgatagtccatgtcgtacagtctttgagagtctttcaatggaagttgtgaactatctgagcagcagaaaccttatgggtaattgggggtcccctgaaatgccagagtggctggttcaacatttcaggtctacgttagcagcagttggaaagtatagacctagacctattgactccgcaggggagatgcaaacttatattatttggtcaagagatggcgtgctagatcaggatgcgttagcccgttcaggcctggatacttctgtgaaggtgtccagattccttctacaaggtaaggacgatttaggaccgaatgggtgggatgacctgcttccgagtaaagacatggccatcgctacgcaatctggaacacatttcacgatgataaacaagcctcatgtcgcacaaatgtccgatttgctgcgtgatgcggttatcggcattgggtccgaccgtcaggctcattggcagcgtgtctcccaaagttaa

SEQ ID NO: 65 - DNA, 6258 bp, Artificial Sequence
  PKSC25B
atgagctctaagttacgtgtagctaatttcctgctatttggagaccaaaccgtcgaaaagctcccagctattaggcacctagtttcccacggagcgtctagcccccttgtccaacgttttctgaggcaattgtgtgacgctgttcagctgcaggtgtccaagttacctctacattctgagcaaaggagtaacattggtaatttcgacagcatcttacgactagccgaaaacaacgcgaggctagaggaaccgaacgaaattatagcaactgtcttgatgaatattgcccgtcttggggaacttatattatatgcggaacaggacccgacggtactagcatccaaaggcaatcgtaactgtatcctgggtttctgcacgggtgaagtcgctgccgcggttgcggcggtggcacaagacacgaacgaactggtggagcttggcgtagaggtaacacacatcatctttcgtatggccagggagctgaatcgtcgttcacttatggtggacaggacaaatgggccctgggcaaggacgatcctgggtatatcagtagaccgtgttagagagattctacaggactttcacgaaaaccagtctatccctagagctaggcaagtttgtatcggcttcgtctccgacggctggctaactttgtttggcccaccaacgacactgcagaggcttttagaatggagtgccgaactagaggatgccccacagatagataccgacgcgcgtggcggggtccatatggagaccctaccagaagtggacccggaccgtatacttggatcaagtccgtggttagacagagccccggtacataccgcaacaataatcagtccctatacgtgcaaaccaagacagcaaaagacactgagagggttactagaagaaattattgcagacgtgggtcagaggacgctaaaccttgcgacaagcatgaatgctgcccttgaattagcgcaggcggacaagatccgtcttgtgatgccagggtatacgtctcacgacgtgtatttccaaaagttacttcagaaacgtggtatcgaatacagtgtcatgtctcacggggaccatctgtcatcaggcccctcccgtcagggttctggtctagtggcagtagttggtatgtctggaaggttccccgggagtggagacatcaacgccttttgggagggactacttgagggtaagagatacattcaggagatccccaacacacgtttcgacctagaacagtggtatgatgcaacgggaaagcagaagaatagtacgatggcacgtacgggtgctttccttgataaaccgggcatgttcgataatcgtctgttcgacatgtcacccagggaggccatgcaaaccgacgtgcagcatcgtctgctaatgacgacaagctacgaggctttggaaatgtcaggttactaccctgatggcacgctttccacgaacaaagacagagttgcatcatttttcggacaaacgagtgacgattggcgtgaggtcgttgttcatcaaggagttgatatttatttcgcgacaggttcctgccgtgccttcgggccgggcagattacatcatcactttaaatggggagggccgagctattcagtggattcagcatgtagttcaagtatcgctgcggtcggattggcttgtagtgcgttgcttggtcgtgaatgcgatatggcactagctggagggggtagcttactgttatcacctagcccattttccggcctgtctaggggtggtttcctttctgctcacggaggttgtcaaacattccatgataacgcggacggttatgtccgtggtgagggagttggggtggtcgtattgaaacgtttggaagatgcgttggacgaccaggacaatatcttgggggtagtacgtggcagtggccgtaactacagttctgacgccagctctatgatgcatccgtctgccaacgcgcaaaagaagttgtattgcgacgtattggagcaatccggtgttgaggctaattccatctcttatgttgagatgcacgggaccggcacgcaagcgggagacttcatggagatgtcctccgttttgtctacttttgctgaaaagcgtggatcagataacccccttatagttggggcgttaaaagctaatatcgggcacggtgaggcagccgctggtgtgtgtgcgttgataaaaaccctaatgatgcttcaatcccgtcaaataccaccacaacccgatttaccagggcccattaatcatcgtttccctgatttggcagccaggaacgtatatattgcagcacgtaatatgagattagaagcctcccccgtcgcaaaggggaccctgagagtctttctgaatagtttcgatgcatctggtggtaacagctgtctgttattagaggaagcgcctccccgtgcggtgaaagacgctgaccccagggggcaccacgtcgttactttcagtgctcgttctcagaaatctttgatctcaataaaagaaagatatctggcgcacctaagacagcatccgggaaccaagctggcagacttggcgtactctacaagcgcacgtagaatccacgggcttcttcgttacgcgatagctgccagcagcatcgacgaagtcgtccaatgtttggaaacagacttagcccaaggcaagacccctagacagcccccagccactccgaccgttgtgttcactttcaccgggcaaggagcacattatgtcggtatgggggcaaatttgtgggagacatctgcgaccttcaggaacacacttcacgactaccagacgatggcgtctgcacaaggactaccgcatttccttcacctgataaccgactcatctacacccgcgccccagtccggtccagataccgtacaagttcaacttgctatggtgtcactggagttagcactagccaaactgtggaggtcatggggtatacagcctgctatggtgttaggacattctttaggggaatatgcggctttatgcgtagcgggagtcttgtctgtctcagataccctttatctagtagcgaagcgtgctcaaataatggcgggcgcgcttacgccacatgaatacggtatgctggcggtaaacctttctgtggcagacacgcgtgaggtgttgagttccgggcagcatacgagctgcgcggtggcttgtatcaatgctccgaaaatgaccgtggtgagtggtttgcgttccaaactggacgatctgcaagaccagttaaagtccgatggtactcgttgcacgcccctttcagtcccctatgggtttcatagctctcaattggaccccattctgggccaattcgaggaagcgtgtcaaggggtcacattttccgcaccgaacgtacctgtcgtctctacccttttggccaccactgtgagagaagaaggcacttttagtccggagtatcttgcccgtcaagcgcgtgaacctgtggactttgtcggagcactgggcgccgttcaagagcacaaattccccagccttacattcttggaaatcggtccagatcccgtatgcagcggcttggtaaatgcgacccttggtgcggatgaagcagccctaaggtgcgtcgcaagcatgcatagaggaaaagctaactgggcgtcaatctcctgcagcctgagggatttatacaccgctggcgcggcgattgactggcctgctcaccatagagatttcaaatcctccgtatcattattggacctgccgaagtactcttttgacgaaaaagagttctgggcgtccttccctgatagggatttacagactattggggatgtcgagacaaagcactctcaaccccctgcgattgtgcccagcgtccagggttactgtactaccacgcttcagagaataacccgtgagactatagagccggatggcctttcagtcacattcagttcagatcttgcagatcaacacttgagggccgccgtaaggggccatgcggtcgccgatgtcgaaatatgttcaagcagcttgttgctagatatggctctaagtgcagcacaatatgcgtatatgaagcatagtccggggcaaaagatgccggtgcccttaacagtcaggaattgttattttcacaggggcgttgtgctaactgataaagctcagacggtggaggtcacagtcaccttaacaagttccgcgaagacagctgacattagataccattgcagaacacctgatgaatattacgaggtgggagcctgtcaagtggtactcaagccagcttcgaagccggaccaagcggggttcctagtacgtagcaggatggcggcccttaaagcaagcgcaagtcacaggttagggaggagagcagtatatagattattcgataacgtagtcagatattccgaacaataccagggattggaaaacgtccacctaagtgaagatatgcaagatgcagtcgcagagattaacatggcccaggtgccggcggctggtggtcactatctgcaccaccccttcctgttagactcaatcgtacacttgtccggtttcttagtgaacaacgggttgaggtactcaagcgaatgggcctgtctttcaaccggctttgacgaatggcacctattgaagccactggacccgacaacagtatatacgtcatacacgttcatggaagattccagaagtacctctaatttagtcacgggcgatgtctatgtatatgatggggaggaattagtgtcagtcctgaccggcttacaattccagaagatgaaaagaactgcccttacacacctgctttcaccaccgacgattggcaatatggcagctaagccgagcaccagaatgccgacgatggcgcagacggaactactgccagtccctacgcctcctgctactgcctccgttgatgacggcgagggtgaaaaatttgatcttgtaaatactttgttctccattattgcgagggaggtcggtgttgaaccgtctgacctggagggggatgttaacttggctaatcttggcatagatagcttaatggccatcacaatcataagcgtgatgcagcaagagactggggtcgagttacctggaaccttcttcttagataatgcgacgacgaccgcagtaattgcggcggtaggcaataaaatggcagttaccgtctggcaggatgcattgaatattatagcacaggaatctgggttggagccagcggagataatcgagacagacgacactgcttttctaactttaggtatcaaccaaatcttagcaacggccatccttgcccatctgaggggcccgaggggagaacctctgccccgtgacatattcgaccaaaaaccaacggtcggtgccttcagaaggttttacgagacgccgatacatctggatattgctcctgttgcggcgccggcgccaccaaaattaaaaagggtcccctccagtagtgtcccgttgtctatagttttgcagaataatccagcttccagcagacataccgtgttcttattgcctgatggctcaggttcagcgatggcatatgcaaaccttcctcccgtgcatccggcggtgtgtatcgtcggtatgaactccccttatctgagggacgcaggcagctataggtgctcagtggaagacctggctagtcaatgggtcagggaagtatatcgtaggcagcccagaggaccatacatcgtagggggctggagtgcaggtggctattattcctacgaggtagcaaagagactactgcaggatggccacgctgtagcgaagttgattttgattgatagtccatgtcgtacagtctttgagagtctttcaatggaagttgtgaactatctgagcagcagaaaccttatgggtaattgggggtcccctgaaatgccagagtggctggttcaacatttcaggtctacgttagcagcagttggaaagtatagacctagacctattgactccgcaggggagatgcaaacttatattatttggtcaagagatggcgtgctagatcaggatgcgttagcccgttcaggcctggatacttctgtgaaggtgtccagattccttctacaaggtaaggacgatttaggaccgaatgggtgggatgacctgcttccgagtaaagacatggccatcgctacgcaatctggaacacatttcacgatgataaacaagcctcatgtcgcacaaatgtccgatttgctgcgtgatgcggttatcggcattgggtccgaccgtcaggctcattggcagcgtgtctcccaaagttaa

SEQ ID NO: 66 - DNA, 1467 bp, Artificial Sequence
  PKSC26C
atggctgtcaagcatctgatcgtgctgaagttcaaagatgaaattactgaagcccaaaaggaggaatttttcaagacatttgttaatttggttaacatcattccagcaatgaaagatgtttattggggtaaggacgttactcaaaagaataaggaagagggttacactcatattgttgaagtcactttcgaatccgtcgaaacaattcaagattatattattcatccagctcatgttgggtttggcgatgtgtacagatcattttgggaaaaattattgatttttgactacacaccaagaaaaggctccacaggtggtagtggagcgtccactggtggtatggcagttaccgtctggcaggatgcattgaatattatagcacaggaatctgggttggagccagcggagataatcgagacagacgacactgcttttctaactttaggtatcaaccaaatcttagcaacggccatccttgcccatctgaggggaccgaggggagaacctctgccccgtgacatattcgaccaaaaaccaacggtcggtgccttcagaaggttttacgagacgccgatacatctggatattgctcctgttgcagcgcctgcaccaccaaaattgaaaagggtcccctccagtagtgtcccgttgtctatagttttgcagaataatccagcttccagcagacataccgtgttcttattgcctgatggctcaggttcagcgatggcatatgcaaaccttcctcccgtgcatcctgcggtgtgtatcgtcggtatgaactccccttatctgagggacgcaggcagctataggtgctcagtggaagacctggctagtcaatgggtcagggaagtatatcgtaggcagcccagaggaccatacatcgtaggaggctggagtgcaggtggctattattcctacgaggtagcaaagagactactgcaggatggccacgctgtagcgaagttgattttgattgatagtccatgtcgtacagtctttgagagtctttcaatggaagttgtgaactatctgagcagcagaaaccttatgggtaattggggttcccctgaaatgccagagtggctggttcaacatttcaggtctacgttagcagcagttggaaagtatagacctagacctattgactccgcaggagagatgcaaacttatattatttggtcaagagatggcgtgctagatcaggatgcgttagctcgttcaggcctggatacttctgtgaaggtgtccagattccttctacaaggtaaggacgatttaggaccgaatgggtgggatgacctgcttccgagtaaagacatggccatcgctacgcaatctggaacacatttcacgatgataaacaagcctcatgtcgcacaaatgtccgatttgctgcgtgatgcggttatcggcattgggtccgaccgtcaggctcattggcagcgtgtctcccaaagttaa

SEQ ID NO: 67 - DNA, 1463 bp, Artificial Sequence
  PKSC27C
atggcagttaccgtctggcaggatgcattgaatattatagcacaggaatctgggttggagccagcggagataatcgagacagacgacactgcttttctaactttaggtatcaaccaaatcttagcaacggccatccttgcccatctgaggggaccgaggggagaacctctgccccgtgacatattcgaccaaaaaccaacggtcggtgccttcagaaggttttacgagacgccgatacatctggatattgctcctgttgcagcgcctgcaccaccaaaattgaaaagggtcccctccagtagtgtcccgttgtctatagttttgcagaataatccagcttccagcagacataccgtgttcttattgcctgatggctcaggttcagcgatggcatatgcaaaccttcctcccgtgcatcctgcggtgtgtatcgtcggtatgaactccccttatctgagggacgcaggcagctataggtgctcagtggaagacctggctagtcaatgggtcagggaagtatatcgtaggcagcccagaggaccatacatcgtaggaggctggagtgcaggtggctattattcctacgaggtagcaaagagactactgcaggatggccacgctgtagcgaagttgattttgattgatagtccatgtcgtacagtctttgagagtctttcaatggaagttgtgaactatctgagcagcagaaaccttatgggtaattggggttcccctgaaatgccagagtggctggttcaacatttcaggtctacgttagcagcagttggaaagtatagacctagacctattgactccgcaggagagatgcaaacttatattatttggtcaagagatggcgtgctagatcaggatgcgttagctcgttcaggcctggatacttctgtgaaggtgtccagattccttctacaaggtaaggacgatttaggaccgaatgggtgggatgacctgcttccgagtaaagacatggccatcgctacgcaatctggaacacatttcacgatgataaacaagcctcatgtcgcacaaatgtccgatttgctgcgtgatgcggttatcggcattgggtccgaccgtcaggctcattggcagcgtgtctcccaaagtggctccacaggtggtagtggagcgtccactggtggtatggctgtcaagcatctgatcgtgctgaagttcaaagatgaaattactgaagcccaaaaggaggaatttttcaagacatttgttaatttggttaacatcattccagcaatgaaagatgtttattggggtaaggacgttactcaaaagaataaggaagagggttacactcatattgttgaagtcactttcgaatccgtcgaaacaattcaagattatattattcatccagctcatgttgggtttggcgatgtgtacagatcattttgggaaaaattattgatttttgactacacaccaagaaa

SEQ ID NO: 68 - DNA, 336 bp, Artificial Sequence
  altOAC1
atgtctagtctagagcattatgtcgtattccaggcgcgtcccggacgtgaaagagatttggattccgcactaagagcgttcgccagctcaatcgctgataccttaccctgtctagccgagttttcctggggtgaaaacattaatccgtcaggaaggcaacatgggtacacacacggatgtcacgccaggctaacgacggcggcagctctgcaagaggagtattgggttcaccctgcacaccagttgctactagggcaacttgacgacctatgtgaagataggtttgcgctggattatgtcacgggggatgaagctgagggtgaagtgccgagataa

SEQ ID NO: 69 - DNA, 312 bp, Artificial Sequence
  altOAC2
atgtctagtataaggcacatcttgttaataagatttcaagagaaaatcactgcggagcagatttccgtggttaaaactatgtttcttagcatcccaagctgcataccgggggtagatagtgtggagtggggtgaaaacaacagcccagagggtaagaatgctggttatactcactgtgttatgataacatttgcggacgaaaaggcgaggcaaaggtacttaccgcatcctgaccacaaagccatccaaagcgtatttaggcagatattgagcaatataattgtctttgactacgaattaatgagaaagtaa

SEQ ID NO: 70 - DNA, 333 bp, Artificial Sequence
  altOAC3
atgtctagtacctgcacatctgctctaagacacatcgttctgtgcgacttcctagatggcatcacaagcactaaacatgctgagcttgtgtacgagttttcacagttgaaacaccgtattcctggcgtccagcaatttgaatggggaccaaacgtttcacccgaaggcctggaggatggctttacagattgtttcacacttacgtttgaccacgctggagcaagggatgcgtatctgacgcatcctgcacatttggcctttgtagaactgttgaagccatggcttgggagggtgttagtgttcgattatcacccccagacccaccctggataa

SEQ ID NO: 71 - DNA, 333 bp, Artificial Sequence
  altOAC4
atgtctagtacttgtagtatacccttgagacacatagttctttgcgacttcttggaagatattactccagcaaagcatgcggagctagtgtatgaattttcccaactgaaacataggattccaggggttttgcagttcgagtggggtcctaatgtatctcccgaggggttggacgatggtttcacagattgtttcacgctaacctttgacggagctagtgcgagagatgtgtatcttgcacatccggcgcatctagccttcgtcgagttactgaagccttggttaggccgtgtgttggtgtttgattatcaaccgagagagaatcccggctaa

SEQ ID NO: 72 - DNA, 303 bp, Artificial Sequence
  altOAC5
atgtctagtattcgtcatattttgttgctaaagttcacctctgaaattaaggagcagcaattgactaccatccgtgatacggctatctccatgcaacaccaaataaagggcatatcaagcatcgagtgggggagtaatgtaagttcagaaaacaaaaacaagggattcacgcatgctataactatgacattcgatgaccaccaagccatctccaactaccttccacatcccgcccatgacaaattaaaggaccttcttatagatagcgtagacgatctaatagtattcgattacgaggtttaa

SEQ ID NO: 73 - DNA, 333 bp, Artificial Sequence
  altOAC6
atgtctagtacatgcaccagtgctctgaggcatattgtactttgtgactttctggacggcatcacatctgccaaacatgcggaacttgtctacgaatttagtcaattaaaacatagaataccaggcgtgcgtcagtttgaatggggtccgaacgtatccccagaagggttggatgatggattcacagactgctttacgctgacgtttgacgatgcggcagcaagagatgtatatctgacgcatcctgctcaccttgcgttcgtggaacagttgaagccttggttaggtagagttctggtgtttgattattatccgcaggaacatccaggttaa

SEQ ID NO: 74 - DNA, 327 bp, Artificial Sequence
  altOAC7
atgtctagttctgaacctgcgagactgcttaggcacgttgtcttgttcaaattccgtgacgatacaccgcccgagcaagtcaaagcgattgaaaccgccttttgcgctctgccgaggcagatagatgcaatacacgatttcgagtggggcacggacgttagcgtcgaaggtatagcaagagggtattcacactgttttctggtgaccttcaagtctgaagtggatagggacgcataccttccccaccccgcacatagggcattcggggacctgctaaggccttataaagagcaggtgcttgttcttgattactgggcgcaggtctaa

SEQ ID NO: 75 - DNA, 324 bp, Artificial Sequence
  altOAC8
atgtctagttctgaacagtctgtacttagacacgtcgtgcttttccaatttaaggacggaactcctgacgagaatgtgagagaaatcgagaatgccttcagggccttaccagggaagatcgatgtcattcaggattttgaatggggtacggacgtgagcgttgaaggtgaggccaagggatacacccactgtttctttgtaacatttgcaactgaagcggacagggacgcatacctaccacaccccgctcatgctgccttcggcgctgtcctaaggccacacctagaaaaggtgttggtgctagactactggcagagaacttaa

SEQ ID NO: 76 - DNA, 216 bp, Artificial Sequence
  altOAC9
atgtctagtattcctcagatattgtcctttgagtggggacagaataattcccccgaaggtttcgacaggggaatgactcacgtcttccttctgacatttgagaacgagagagctagagatgagtatctaccccacccagcccataaggcgtttggcgatacgcacggcggcataatagaagcattagttgtggtcgattacacaatcaatcagtaa

SEQ ID NO: 77 - DNA, 219 bp, Artificial Sequence
  altOAC10
atgtctagtcagattaaaacaatcaagggctttgaatggggaactaacaactctccagaggggctagagcagggcttcacacactgcttcttcttaactttcgactctgaagaaggtagagcgacatatctgccccacccagctcataaggcattcggtgaagtcctaagcccttatttggacaaggtgatggtgctggactattggactaaggaataa

SEQ ID NO: 78 - DNA, 207 bp, Artificial Sequence
  altOAC11
atgtctagtattaagcacttcgagtggggagtcaataactcccctgaaaatctaaatcagggtctaacacattgtttcttcgtcacattcagctccgaaaaggatcgtgatgattacttagttcaccctgctcacaaggcattcacacaacttttgccgaacatattagaaaaggtgacagtcctagattactgggcgcagccctaa

SEQ ID NO: 79 - DNA, 303 bp, Artificial Sequence
  altOAC12
atgtctagtataagacatattctgcttctgaagtttacaccagaaattaaggagcagcagttgacgacaattcgtgacactgcaatttctatgagccaccaaatcaagggaatcagtgcgatcgagtggggaggtaacgtaagtagcgaaaacaagaacaaggggtttacacacgcgataacaatgaccttcgatgaccagaaagctataagcaattacctgtctcatccggcgcatgacaaattaaaagacctactgatagactcagtagctgacatcatagtatttgattatgaagtctaa

SEQ ID NO: 80 - DNA, 204 bp, Artificial Sequence
  altOAC13
atgtctagtactgcatacgagtggggccgttccgaaagcgtagagggcaagaatgacggctttacccattgcttctttgtcaccttcaaagacaaggccggactggagacttatataccacacccggcccacgctgccttcaaggacattttcatcccgatactggataaagcactggtttatgattacacagctaagaactaa

SEQ ID NO: 81 - DNA, 183 bp, Artificial Sequence
  altOAC14
atgtctagtaccaacgtctctaaagaaggtaaatcagaggggctaacgcattcctttgttctaacttttaagaacatggaagatttagacgcttacattgcccatcccgcccatcaggcttatgttgatatcgtaaaaactcgtcgtgaaaaagtggtagtctttgactactgggtgaaataa

SEQ ID NO: 82 - DNA, 213 bp, Artificial Sequence
  altOAC15
atgtctagtgatgttattgtgggttttgagcatggtacgaacgtaagtcaagagggcaagagtgaggggttcacgcatgtattcactgtaacatttagggaccaagcgggattagaaaagtatttagtacacccggctcatcttgattacgttaaagttgtaagagaccgtagggaaaaagtagtggtgtttgattattggacaaaagagtaa

SEQ ID NO: 83 - DNA, 348 bp, Artificial Sequence
  altOAC16
atgtctagtgcgccgtgcgcctcagccgaggaggccccagcgcaggtattgcgtcacatggtactattgaagttcaaggatgatgcgacagccgcccaagtgagggagatagaagtagcgttttgtcgtctaccatccgcaacgggcgtaatacacaacttggaatgggggacgaatgtttcaccagaatctcttgatcaaggttacacgcattgctttttccttacattcaagaacgaagcagaccgtgatgcctacctgcctcaccccgctcacaaagagtttggggcgcttcttggtcccgttctggacaaggtgctagtaatagactactggactaagccctaa

SEQ ID NO: 84 - DNA, 225 bp, Artificial Sequence
  altOAC17
atgtctagttctagtgataccatctatgatttcgagtggggaaagaactgtagcacggaggggaaatccgagggttacactcactgcttccttgtaaccttcctgtcagaggagggtagagcaacttatctgccccacccagcacataaggaatttggtaagctactgggtccttaccttgaaaaggttttggtcttagattattgggcaaaagtcccgtgctaa

SEQ ID NO: 85 - DNA, 207 bp, Artificial Sequence
  altOAC18
atgtctagtatcggcttcgagcacgggccgaatgtaagccaggagggtaaatccgaggggtttacccacatgtttgtagtgacatttagggatcaggcgggtcttcaggaatatctagtgcatccggcacacttgcactatgtgtccgttgtgaaagacagacgtgaaaaagtcatagtgttcgattactggaccccggcgaagtaa

SEQ ID NO: 86 - DNA, 303 bp, Artificial Sequence
  altOAC19
atgtctagtattaggcacatacttctaattcaatttaaggacgatgcgacaccgccacaggttgaggaactgaagcaatcttttctatccatgccgaacatcattgatggtgtggagtatgtggagtggggacttaacgatagttctgaagggaaaaacaaacactacacgcattgtgttatgatgactttcagtgacgaagccggaagacagaggtatctgccccatccggcgcatgacgtgttaaagaatatatttcgtccgattttagaagacataatagtgtttgactacacggtttaa

SEQ ID NO: 87 - DNA, 327 bp, Artificial Sequence
  altOAC20
atgtctagtaacccaaagctaccactattaagacacgttgtacttttcaagtttagagactcttcaactgaggacgaggtggagcacgttgtttcctcattcatgtcactgaagaaccaggtgccacagattgttgcaatggaatggggcaggaatataagcgaggagaatcatcaccagggtttcactcattgtttcattatatcttacgagagcatccaagacctgacaaactaccaaaaacaccccgcacaccttgactttcaacaaattcttgggccgcacatggagaaggtgtttgttgtggattactactccaacgattaa

SEQ ID NO: 88 - DNA, 138 bp, Artificial Sequence
  altOAC21
atgtctagtttagtcacttttgatgacgccaaggcgcgtgatgcttacttaccccatcctgctcataaagcatttgttgaggtgctgaaacctatacttgataaggtgctagtagttgactacgttgcaaagaagtaa

SEQ ID NO: 89 - DNA, 303 bp, Artificial Sequence
  altOAC22
atgtctagtattcgtcatatactactgttgaagtttacatcagagataaaggagcagcagctgacgacaatcagaaacacggcgatttcaatacaacacaaaataaatggcatcagctctgtagagtggggcggaaatgtcagttcagaaaacaagaacaagggcttcacacatgccataactatgaccttcgacgaccacaaagccatcagtaactatctttcacatccggcccatgataaattaaaggacttactaattgactccgtggacgatattatagtttttgattatgaagcctaa

SEQ ID NO: 90 - DNA, 339 bp, Artificial Sequence
  altOAC23
atgtctagtagcataacccatatagtacagttcgcttttaaggcggacgcaagtgcggaagatctgcagaaaattgccgcagggttcttagcgttaaaagaccaatgcctacacgctaccacccagaaaccttatatacaaagtttgacaggcggtaagaataatagcactgagggattcaataatggattaacccacgccttcgtagtccatttcaactcagcggaggaccgtgactattatgtaaaccacgacccggcacataggaatttcgtggttattgcaaaacctttgctggagaagatctctgtgctggactatacgccaggcgtcttttaa

SEQ ID NO: 91 - DNA, 342 bp, Artificial Sequence
  altOAC24
atgtctagtgagaaaataatacacattgttcattttcagttctacgacacggccacgccagaggaaataaagggtgtgtgcgaatgtttcgtagggttgaaggaaaattgcatccatcccacgacacaaaagccctacatactgagtaccacagggggtaaagataattctcccgagggcctgcaagggatatttactcatagctacattctggagttcgcttctaaagaagatagagattattacatatcccacgaccccgctcatatggcatttggacacagtcttaccggcattgtccagaaggttatggtgatggatttcgtgcctggggtttattaa

SEQ ID NO: 92 - DNA, 339 bp, Artificial Sequence
  altOAC25
atgtctagttctataatccatatagtcttattccagttcaaggctgggattgaccctactgtggtcaaagatacctgcaatcgtatgttggctctgaaggataactgtttgcaccctacatcacagaagccatatataaaaacttctagtggtggcagcgataactccccagagggcatccaacatggtattactcacgctttcgttgtggagtttgcatctgcggaagacagagattattatacacacaaggaccctgctcatttagcttttgttcgtaccctggatggcgtaatcgagaaagcgcaggctgtggactatacgcctggagtgtactaa

SEQ ID NO: 93 - DNA, 336 bp, Artificial Sequence
  altOAC26
atgtctagtgaggaagcaaaaggtgttgttaaacacatcgtagttgcaaaattcaaatacgacattagtccacaacaaattgaggaactaattaacggctacgcgaacttggtgtcccttgtgccgagtatgaaggcatttcaatggggtaaagacgtgagcgccgaaaatatgcaccagggttttacgcacgtttttgagtcaacctttgaaagtacagaaggggtggcagaatatgtggcgcacccagcacatgtcgagtacgcgaacttattgttgccctgtcttgacaaagtcatagtcattgactataagcctactaccttgcacgtgtaa

SEQ ID NO: 94 - DNA, 336 bp, Artificial Sequence
  altOAC27
atgtctagtgaagaagcgaaaggggtcgtgaaacacgttgttctagcaaagttcaaggagggcgtgagtgagtcccagatcgaccaactaataaaaggatatgctaacctagtaaacttgattgatcccatggaaagttttcattgggggaaggatttatcaatagagaatctacaccagggttttacacacatttttgaatctagcttcaagtcaacggaggcggtcgctgaatatgtggcccatccggcccacgtcgagtttgccaacctgtttctttcccacctagagaaggttctggtctttgattacaaacctacaaccgtctgtgtctaa

SEQ ID NO: 95 - DNA, 342 bp, Artificial Sequence
  altOAC28
atgtctagtgaaggggcgaaggccggaggagttgtaaagcacatcctgttagctaagttcaaagacgaaattccgcagtatcaaatcgaccaactgatacaggggtacgccaaattggttcatctgattgaaccgatgaaggcattccattggggcaaggacgtttccattgaaaatttgcaccagggttttacacatgtctttgagtctacattcgaaagcgtcgaagggatcgctgcttacatctcccatcctgcccatgtggaatttgccaacattttcttaggcttccttgaaaaggtactagtcgtagactacaagccgatgcccgtacaactttaa

SEQ ID NO: 96 - DNA, 336 bp, Artificial Sequence
  altOAC29
atgtctagtgaagaagcgaagggtttagtcaagcacgtcgtattggcaaaattcaaggatgaaattcctccagaccaaatagagcagctaataaaaggctttgcgaatctagtaaatttaatagaaccgatgaagtccttccattggggaaaggacgtctccgtagaaaatttacaccagggtttcacacacgtttttgaatctaccttcgagtccacagaggggatggcagagtatattgggcatccagcccacatcgaatttgccaaccagttagtacccgttcttgagaaacttgtagtcatagactacaagccaacaatcgtgcacacttaa

SEQ ID NO: 97 - DNA, 399 bp, Artificial Sequence
  altOAC30
atgtctagtccgaaaggggtggttaagcacatactgctggacaaattcaaagatgatatacccccggaccaaattgatcagttgatcaagggctacgcgaatcttgtgcatcatattgagcctatgaaatctttccactggggaaaggatgtatcaatagagaatcttcatcagggcttcacacacgtttttgaaagcacttttgaatctgtagagggtattgctgaatatctagcccatcctgctcacgtcgaatttgctaacattttcctacctgtactagagaagttcttagttgtagactacaaacctgagcccattttggacagtcattacgctcaacccccaagaaccgcttaccagcctttgcaaaactcttttcccttcaaccaagtttaa

SEQ ID NO: 98 - DNA, 336 bp, Artificial Sequence
  altOAC31
atgtctagtgaggaagctaagggagttgtaaagcatgttttgttagcaaaatttaaggacgaaatccctacgcatgaaatcgataaacttattaagggctatgcaaatcttgttaatctgatcccaccaatgaaggcgttccactgggggtctgacgtctcaatagaaaacttacatcaaggatttacgcatgtattcgagtcttcctttgagtcaactgaggacattgcagaatatatttcacatcctgcccatgttgagtttgcaaatctatttcttagagccgtcgataaggtaatcgtcatcgactacaaaccgacgatagtacacctataa

SEQ ID NO: 99 - DNA, 345 bp, Artificial Sequence
  altOAC32
atgtctagtgctgaggaggttaaagaagtacatcatttagtaatggctaaatttaaggaagatatcacgcctgagaaaatagaagagctgatcgaaggctacgcgaaccttgtaaacttagttcctcccatgaaggcttttcactggggcacagatgtaagcattgagaatttgaatgaaggattcacccatatctttcacgcaaccatcgaaagtagggaaggactggctgaatacgtgaatcaccctgcgcacatagagttcggcaatcttatgacccctgcgatggagaaagtaatcgtcgtagatttttcacccagtctagtacaacttcagagggaataa

SEQ ID NO: 100 - DNA, 336 bp, Artificial Sequence
  altOAC33
atgtctagtgaagaagcggaaggtgttgttaaacacgttgtattggctaagttcaaggaagaaatgacggacgaccaaatcgatcagctaattaaaggatacgcagaccttgtaaatcatgttgagccgatgaagtccttccactggggtaaggatgttagcgccgaaaatatgcaccagggttttacacacgtttttgaatcaacatttgagtctaccaaaggtgtcgccgaatacgtcgcgcacccggcgcacgtagattttgctaataagttcttggcctcaacggagaaagtcgtagttattgattacaagcccaccacggtaagatcctaa

SEQ ID NO: 101 - DNA, 336 bp, Artificial Sequence
  altOAC34
atgtctagtgaagaagccaaaggagtggtcaaacatgtagtattagcgaagttcaaagatgggatcgcggagaataagattgaagaaataattaaggggttcgccaatctggtcaacctgattgaaccaatgaagtcctttaattggggtaaagatgtaagttctgagaacttacaccagggatttacacatatattcgaaagcacttttgaatcaacggaaggtgtagccgaatatgtggcacaccccgctcacgttgattttgccaacttattccttagccatttggagaaggttattgttatagattacaaacccactgcagtctccgtctaa

SEQ ID NO: 102 - DNA, 336 bp, Artificial Sequence
  altOAC35
atgtctagtgaggaggccaaagggcttgtaaagcatgtagttttagccaaatttaaggacgagacacctcctgatcaaatcgagcagctaataaagggctatgcgaatctagtaaacttaattgagccaatgaaatcttttcattggggcaaagacgtaagtatcgaaaatctgcatcaggggttcactcatgtcttcgagtcaacatttgaatccacggagggcattgcagagtacattgggcaccccgctcatgcggagttcgccaatcagttcttaccgcaggccgaaaaggtcgtcgtcattgacttcaagcccaccgttgttcacacgtaa

SEQ ID NO: 103 - DNA, 336 bp, Artificial Sequence
  altOAC36
atgtctagtgaagaagcaaagggttttgttaggagagttctattgtttaagttcaaagccgaaaccgcccctgaccacatcgaaaatctaattaaggaccatagtaacctggttaaccttgttgagagtttaaagtcatggcacatgggaaaagatgtgtcagttaaatatagtcccgacggcttcacgcacgttatagaattgacctttgagagcaccgagggaattgcggcttacatggctcatccggcgcacctagagatgcacgaaaggatttggcctcacctagagaagattctggttatagattacaagccaacgcctttctgcacataa

SEQ ID NO: 104 - DNA, 336 bp, Artificial Sequence
  altOAC37
atgtctagtgaggaagctaaaggggttgtaaaacacgtgcttattgcgaagttcaaggaggggactagcgaggatcagatagagcacctgattaaaggctatgcgaatctggttaatttgattgaacccatgaaggcgttccattgggggcgtgatgtaagtgttgaaaacatgcatcaaggctttacacatatattcgaatccagctttgagtccaaagagggcatagccgaatatatagctcatccagcccatgtggacttcgcaaatttgttacttccgcagcttgagaaagttatagtcatagactacaagcctactactgttcgtgggtaa

SEQ ID NO: 105 - DNA, 336 bp, Artificial Sequence
  altOAC38
atgtctagtgaagaagcgaaaggactagtaaaacatattgtcctagctaggttcaaggacggaacggcgcaggaagaaatcgaccagttaataaagggttacgcaaatctagttaatttagtagagccaatgaaatcttttcactgggggaacgacgtaagtatcgagaatcttcatcaggggttcacccatgtctttgagtcaacttttgaatcaacagagggtgtcgccgagtatgttgcacatcccgcccatgtcgaatttgctaacctgttcttgtcaaaaagcgaaaaagtactggctatcgactacaagcccacaactgtaagaatttaa

SEQ ID NO: 106 - DNA, 336 bp, Artificial Sequence
  altOAC39
atgtctagtgaggaggctaaaggtctagtgaagcacatagttctagtgcgttttaaggatggtacggcgcaagaagaaatcgaccagttgataaaaggttacgcgaatcttgtgaacctggtcgagcccatgaagagcttccattggggtaacgacatatccattgaaaatctgcaccaaggattcacacacgtctttgaatctacatttgaaagcacggagggcttagcagaatatgttacccatcctgcacacgtagagttcgccaaccttttcattactaaaagcgaaaaagttcttgcaatagactataaacccactaccgtgcgtatctaa

SEQ ID NO: 107 - DNA, 336 bp, Artificial Sequence
  altOAC40
atgtctagtgaggtcgccgttggcgaagtgaaaaggatattgctagtcaaatacaaggaggaggtctcaccagaaaagatcgaggaattgaccaaagaatgggctaacttagttcactgcatagagccattaaaggacttccactggggaacagacattagctttgaaaataaaaatgagggcttcactcacgctttcgttttgacgttcgagagcatggaaggtgttgctgagtattttcaccatccggctcacgttgagtttggtaaaaaggcaatgccgtgtgcggaaaaatttatagtattcgactacaaacctaccctagtgaagcagtaa

SEQ ID NO: 108 - DNA, 336 bp, Artificial Sequence
  altOAC41
atgtctagtgaacaagttaaaggtgttgtcaagcacatggttttagcaaagttcaaggagggagttcctgaggaagaaatagaaaaacatataaaagattacgctaacctgttgaaccatatcgaacacatgaaatctttccagtggggaacggacgtatcaatcgagaatttacaccagggctttacgcacatctttgaggtgacgtttgagacgttggacggtaggtctgcctatgttgcacaccccgcccacgtggacttcggtacagcattcttgaccatacttgagaaaatcgtcgtagtggactttgtgccgaccttggttaaactttaa

SEQ ID NO: 109 - DNA, 360 bp, Artificial Sequence
  altOAC42
atgtctagtgagagggaacgtgaagttaaacgtagaggtatggaaggtggtaaaggggttgtgaaacacatagtgcttgccaagttcaaagagggaacaacggaggaagagatagaaaagcacattaaaaattatgccgatcttcttaaccacatagagcacatgaagagctttgagtggggaacagatgtgtcaatagagaatctgcaccaggggtttactcatatcttcgaggctacatttgaaacgcttgaaggaaggtccgcctatgtcgctcatccagcacacgtaaagtttggtaccgctcttttccctactttagagaaggtcatcgtctttgactacgtccctaaggcataa

SEQ ID NO: 110 - DNA, 327 bp, Artificial Sequence
  altOAC43
atgtctagtgagggcgggaaaggcgtggtcaagcacattgtattagcgaaattcaaggagggtacgactgaagaagagattgagaagcacgtgaagaattacgcggatctgcttaaccatatcgagcatatgaaatccttcgagtggggaacagatgtaagtatcgagaatctgcatcaaggcttcacgcacatattcgaggccacctttgaaaccctggaggggaggagtgcctatgtagcccatccggcacacgtaaaatttggcactggtttgtttcctaccttagagaaagttattgtgattgattacgtcccgaaggcttaa

SEQ ID NO: 111 - DNA, 348 bp, Artificial Sequence
  altOAC44
atgtctagtgccgctgctgccggttccggcgggggtggggtcgttaagcacctagtaattgtccagtttaaggaagacgtaacacccgagaggctagacgggctaattagaggctatgctgggttagttgataaagtaccaagcatgaaggcattccactgggggacagatgtatcaatagagaatatgcaccaaggattcactcacgttttcgaatctacatttgaaagtacggaaggcgtaaaggagtacgtctaccatcccgcgcatgttgagtttgccaccgacttcttaggaagtactgagaaagtcttgatcatcgatttcaagcccgctgctgggaactaa

SEQ ID NO: 112 - DNA, 336 bp, Artificial Sequence
  altOAC45
atgtctagtgaggaagcaaaaggggtggtaaagcacgttgtccttgccaagttcaaggatgatgtttctccgcagaaaattgaagaattgattaaaggttatgcaaacttagttaagatagtacctcccatgaagagtttccattggggcaaggatgtaagcgcagaaaacatgcatcagggttttacacacgtctttgagagtacgtttgaaagtacagaaggcgttgccgagtatgtagcacatccggcccacgttgagtttgcgaacctttttcttagtcatttggacaaggtgatctgtgttgattataaaccgacgattgtccatctttaa

SEQ ID NO: 113 - DNA, 336 bp, Artificial Sequence
  altOAC46
atgtctagtgaagaagctaaaggtgtagtaaagcacatcgtggtcgcaaaatttaaggacgatatatctccgcagcaaatagaagaacttatcaacggatacgccaaccttgtaagcctagtcccctctatgaaggcctttcaatggggcaaagatgtttctgcagaaaacatgcatcaaggatttacgcacgtattcgagagtacattcgagtccactgaaggagtagcagagtatgttgctcatcccgcccacgtagagtatgccaatctgttcttaccgtgcttagacaaagtaatcgttatagactacaaacccacgacccttcacgtttaa

SEQ ID NO: 114 - DNA, 327 bp, Artificial Sequence
  altOAC47
atgtctagtgaggaggcaaagggattagtaaaacacatagtactagcgaaattccaagacgatgtgacaaccgagaagatagaggaattgataaatgctttcgcgaatcttgtcaatcttatcccaccaatgaagtcattccactggggaaaggatgttagtgtggaaaacctgcatcaggggttcactcatgtcttcgagagcacgtttgaaagtacggaagcgattgccgaatacctagatcaccccgcgcatgtcgaatttgggaatttgcttttatccaaccttgacaagatcttggtcatcgactacaaaccgacaagttaa

SEQ ID NO: 115 - DNA, 342 bp, Artificial Sequence
  altOAC48
atgtctagtgcagcagctgccgggtccggtgggatggttaaacatctagtcttagcgagatttaaagaggaagcaatgcccgaggcgttagatcaactgatccgtagatatggcggtttggtacatgccgtgccgtctatgaaggctttccactggggtacggacgtgagcatcgagaatatgcaccaaggtttcacccacgtctttgagtcaacctttgagagtaccgagggggtcaaagagtacgtgtaccaccccgctcatgttgagtttgctaccgacttcctgggttccacagaaaaagtgctaattatagattttaaaccagcggcagtgaactaa

SEQ ID NO: 116 - DNA, 336 bp, Artificial Sequence
  altOAC49
atgtctagtgaagaggcgaaaggggtcgtgaagcacgtcgttttggggaagtttaaggaggaaacgactagcgataggattgacgagctgattaaagcctacgccaatctggtgactctaattgagcctatgaaatcctttcactggggtaaggacgtgagtatagagaacctacatcaagggttcactcatatcttcgaaagtaccttcgagtctacggaaggagtggcagaatatgtggcacatccggcccatgtagaatttgcaaacctttttctgagtcaccttgataaagttcttatattcgattacaaaccgaccacgttacgttgttaa

SEQ ID NO: 117 - DNA, 342 bp, Artificial Sequence
  altOAC50
atgtctagtgctatggaagaagcgaagggcgtggtcaagcatgtagtcttggccaagttcaaggatgatgtggccccggaaagggtcgcggatcttattaccggttacgctgcgctggtgccggttattgaaccgatgaaagccttccattggggcacggacgtttctgcggagaatcttcatcagggattcacccatgtttttgaaagtacatttgagagcgtggagggggtggctgagtacgtagcacatccggcacacgttgagtttgcgaataagttgctaccagagttagagaaggtggtggtcattgattacaagccgactaccattaaactttaa

SEQ ID NO: 118 - DNA, 354 bp, Artificial Sequence
  altOAC51
atgtctagtgctgatgctaaaggagtcgcagaggccgaaagggttgccaagcatatcatcttggcaaagttcaaagaagacgtatctgccgaagaaattcaacaactgatcaaaggtttcgcaaatcttgtgaatctgataccacctatgaagtcttttagatgggggacggatgcgggtattgagaaacttactgaaggatatacacatgtatttgaatcaacattcgagaccacacaagggatcgcagagtatgttgctcacccagctcatatcgagtattccaacttgctggccccagcactagagaaagtgttagcgatggactatcaatctaacatagttcaactataa

SEQ ID NO: 119 - DNA, 324 bp, Artificial Sequence
  altOAC52
atgtctagtgaaaatcagagtaccgaggagaagaaagggggtaagtgcggtggtgactataagcatctagttcttggaaaattcactcaagaaacaacccaacaagaaattgatgatctaattaaggggtacgccaacctagtctccttagtgccgcccatgatttcattccgttgggggaaggacgtatctcaggaaaacctaaatcagggctacacgcatatttttgagagtacattcgacagcacagaggacattgcggaatatgtagcccatcctgcacacgtcgaatacgcgaacaaactgttgccgaagctggagtaa

SEQ ID NO: 120 - DNA, 336 bp, Artificial Sequence
  altOAC53
atgtctagtgaagggaacaaggaggaggtgaaacatattttggtcgttaaattcaagcccgagacctcagaggagcgtgtggaggaactgataaaggagttttccaagttaaccgacgagataaagactattaaacacttcatatggggtaaagatgagagcacggctaaccttcaccagggtaatacacacgtattccagcttaccttccagagtatggatgatgtgaacgcatacatcgcacatccggctcacatggccttcgcacaacagcttttgggtgccacagactcaataatactgatggactataaacccattacggtaaacctttaa

SEQ ID NO: 121 - DNA, 336 bp, Artificial Sequence
  altOAC54
atgtctagtgaggaggctaagggattggtaaaccacgtcgtgttgaccaaattcaaagatgatgtggcgccggaaagaatcgaagacttcattaaaggattcgcaaacttagtcaatcttatcccgccaatgaagagcttttcctggggcaaggacgtgtctgacacctctatgcaccaaggtttcacccatgtctttgtctccacctttgaaagtacagagggtgtagcagaatatttagcacatcccgcgcatgtcgagtttgcgaacctttttcttctgtgctttgaaaaagttatagcaatagactataaaccgacaattgtgaaattataa

SEQ ID NO: 122 - DNA, 336 bp, Artificial Sequence
  altOAC55
atgtctagtgaggaagctaaggggttggtaaaacatatcgttttagctaaatttaaggatgacgtagcgcctgaaaggatcgaggatctaatcaaggcatatgccaagttagtgcatcttattcctccgatgaaaagtctgcactggggaaaggacgttagcgatacaaatttgcaccagggatttacgcacgtgttcgagtccacctttgagtcaatcgaaggagttgccgaatatgaagcccacccggcccacgtcgaatacgctaatcttttcttatcctttgctgagaaaatcgtcgtggtaaattacaagcctaccacggtaaatctttaa

SEQ ID NO: 123 - DNA, 336 bp, Artificial Sequence
  altOAC56
atgtctagtgaggaagccaagggcgtagttaagcatattgtactggctaagttcaaggacgaaacgacgcctgaaaagatagaggagctaatcaaagcctacgccaatctagtaaatttaatcccgcctatgaagacttttcattggggaaaagatgtctccgttgagtctttgaaccagggattcactcatgtctttgaatcaactttcgagtctgcagagggcatagccgaatataacgcacatcctgcacatgatgagttcgcgaacttgtttttgagtcactcagacaaagtcataatcttcgattacaagccaacggtgttcaggtggtaa

SEQ ID NO: 124 - DNA, 327 bp, Artificial Sequence
  altOAC57
atgtctagtgaggaagccaaaggcgtggttaaacatatagtattggcaaagttcaaggatgacataaccgcagaaaagattgaagagttaataaaaggttatgctaacctagtaaacctagtccctccgatgaagagcttccattggggtacggatgtcagtgcagaaaatttacatcagggatttacgcatgtcttcgagtcaacctttgagtctactgaaggggttgccgagtacgtcgcgcacccagcccacgtcgaatttgcgaacctttttatttcaagcacagaaaaagtcatagtgatcgactacaaacccacaatttaa

SEQ ID NO: 125 - DNA, 336 bp, Artificial Sequence
  altOAC58
atgtctagtgaagaggccaaaggggtcgtcaaacacattgttatcggcaagttcaaagacgacataactccccaacgtatcgaggaattgataaaagcatacgcgaacctggtaaatcttatcccacccatgaaatcttttcagtggggcaacgatgtgagcgcggaaaatctacatcaaggcttcacccatgtatttgaatccacatttgagagcaccgagggggtggcggagtatgttgcacaccctgcccatgtcgaatatgccaacttgttattaccatctctggaaaaagtaattgtaatcgactataagccgacaattgtgaaattttaa

SEQ ID NO: 126 - DNA, 336 bp, Artificial Sequence
  altOAC59
atgtctagtgaagaggccaaagggttggtacgtcatcttatcttgctaaaattcaaagacggcaccccacccgcacaaatagaacaaattattaagaattacgcaaatcttgtgaatctaatagagcctctaaagagttggagaatgggcaaggatttgtcagtaaagaacttggaccaaggtttcacccacgcatttgatctgacctttgagtctgacgaaggtttggctgagtacaacgatcatccagcccataccaaacttagcaaccaaagtagaccgcatcttgacaagtttgtcgtcattgactataagcccaccgcttttagtacctaa

SEQ ID NO: 127 - DNA, 336 bp, Artificial Sequence
  altOAC60
atgtctagtgctgctggtaatggcggagtagtcaagcatttagtcatcgttcaattcaaagagggggttacacccgagaggctatctggtctaatctccggctatgctgggctagtggacaaagtcccgagtatgaaagcctttcattggggaaccgatgtatccattgaaaacatgcaccaggggttcacacatgtatttgagagcacattcgagtcaacggagggagtgaaagagtatgtgtatcatccagcccacatcgagtttgctaacgactttttagcttccacggagaaggttttgattattgactttaagccttcagcggctaattaa

SEQ ID NO: 128 - DNA, 327 bp, Artificial Sequence
  altOAC61
atgtctagtgaggaagcaaaaggggttgtcaaacatattgtattggccaagttcaaagacgatgtcacgcccgagaagatcgaagaactaattaaagggtatgcaaaccttgtcaatcttgttccgcctatgaaatccttccattggggcaaggatgtatcagcagaaaacctgcaccagggctttacccatgttttcgagtctacatttgagtcaaccgaggccatagcggagtatgtcgctcacccagcccacgttgagttcggcaacttactgcttagtaatttggagaaaattattgtgatagactacaagcctacaagctaa

SEQ ID NO: 129 - DNA, 336 bp, Artificial Sequence
  altOAC62
atgtctagtgccgaggcgaaggggattgtcaagcatattgttctggctaagttcaaggacgagtttagcgaacaacagatcgaagagcagattaagggatacgccaatttagtaaacctaatcccccaaatgaagagtttccattggggcaaagacataagtgcagagaaccttcatcaagggtttacacacgtttttgaatcaacattcgagagcgtggaagccatcgcggaatatgtagcgcacccggcgcatgtagaatacgccaaccttttcttgagttccctagaaaaggtaatcgtaatagactacaagccaaccatagtgaatctgtaa

SEQ ID NO: 130 - DNA, 342 bp, Artificial Sequence
  altOAC63
atgtctagtgacgcggcgaaaagtcaaggagtcgtaaaacatatacttttggctaagttcaaagatggcattccccaagaccagatcgaccagcttattaacggctacgcgaagctagtacatcttatagagccaatgaaagccttccactggggtaaagacgtttcaatcgaaaatatgcaccaggggttcacccacgtatttgagagcacgtttgagtcagtggagggcatcgctgaatacatttctcatcccgcgcacgttgagtttgccaatatcttccttcctgtgcttgataaagtattagtggtagactacaagccgactcccatacaattataa

SEQ ID NO: 131 - DNA, 348 bp, Artificial Sequence
  altOAC64
atgtctagtgccgcagaggctgggagcggcggagttgttaaacatattcttttggcgcgtttcaaagaagaggtcccgcccgaacgtttggaccaacttattagaggctacgctggcttggtgaatctagtgccgagcatgaaggccttccactgggggacggatgtttctatagaaaacatgcaccaagggttcacgcacgtgtttgagtccacgtttgagagcaccgagggagtgaaagaatacatcgagcatccggcccacgtggaatttgctaacgagttcttgccggtattggagaaagtccttatcattgattacaaaccaacggctgtgaacccgtcttaa

SEQ ID NO: 132 - DNA, 324 bp, Artificial Sequence
  altOAC65
atgtctagtgccgaggttaagcatatagttctgggtaaattcaaagacggcatcccgcaggaggaaatcgatcaattgataaagcaatatgccaatctagtaaatcttatccagccaatgaaatccttcagatggggcaaggacgtgagtatcgagaatctacatcaaggctttacccacgtatttgaatctacattcgagtcctgtgaaggggtggccgaatatattgctcacccagaccatgtggagtacgcaagcaagctgttaccacaactagaaaaggtgctgataatcgactataagccagcacccgtgcaattataa

SEQ ID NO: 133 - DNA, 321 bp, Artificial Sequence
  altOAC66
atgtctagtgctgtaaagcacatcgtcatagcgaaattcaaagatgagatttcacaagagaaaattgatgagcttataaaagggtatgcaaatttggttaatcttataccccctatgaagtcattccactggggcacggacgtaagtgctgaaaatctacatcagggatttactcatgttttcgagagtaacttcgagtcagtggaagccattgccgaatatgtagcacatccagctcacgtagaatacgctaatttatttctttccaatttggaaaaagtgattgcaatcgactataagcccacgattgtcaacctttaa

SEQ ID NO: 134 - DNA, 333 bp, Artificial Sequence
  altOAC67
atgtctagtgagcaagtcaaaggtgtcgtcaaacacatcgtactagccaaattcaaagaaggagtggcggaggaggagattgaaaaacatattagagagtatgcaaatctttgcaacttgatcgaacaaatgaagtcattcgaatggggaacggacgtatcaatagagaatctaaatcaagggttcacgcatatttttgaaacaacttttctgaccctggaagacagaagtgcttatgtagcacatcccgctcatgtaaagtttgggacggcgtttcttcacattgccgaaaagatagtggttattgattacgtccctcgtcctgagcaataa

SEQ ID NO: 135 - DNA, 348 bp, Artificial Sequence
  altOAC68
atgtctagtgaggaagcgaagggggttgtaaagcacattttcgttgctaaatttaaggacggtacgaccccaaaccagattgaccatttgattagagaaatggctaatcttgtcaatttgatcgaacccttaaaatcttttcactgggggaaggacgtcagcgcgggaaataagaaccaaggcttcacccatgtcctagaatccaccttcgaaagcatgaagggtgtagctgaatacatcgcccaccctgcccatgtcgagtacgccaaggcgcttcttccccatgttgagaagtacatggtaatagactataaacccacaaccctgaattttggtctggaagggtaa

SEQ ID NO: 136 - DNA, 336 bp, Artificial Sequence
  altOAC69
atgtctagtggagaagcgtcaggcgtggtcaagcacatagtcttagccaaatttaaggatgatataactccccaacagatacatgaattaacgaaagcctacgccaaccttgtcaacttgatacccccgatgaagagctttcattggggtaaagatgtgtcagctgagaatcttcatcaaggatttactcacgtattcgagtctaccttcgagagcacagaggccgtagccgaatacgtcgcccatccagctcatgtagagtatgcaaaccttttgttatccaagctagaaaaagttataatttttgactataaacctacgacagtacaattataa

SEQ ID NO: 137 - DNA, 339 bp, Artificial Sequence
  altOAC70
atgtctagtgcggctggcggcggttctggggtcgtcaaacacatcgtccttgcaaggttcaaagaagaagttactcctgaaaggcttgatcagctaatccaaggctatgctgcattggtggatgccgttcctagcatgaagagctttcattggggaacaaatgtatccatagagaacacgcatgaaggattcacgcatgtatttgaatcaacttttgaatccacggagggtattaaagagtacgttaaacacccggcacatgtagagtatgcgaacgagtttctttctgtctcagaaaagatactaatcattgattacaaaccgacatctgtcaattaa

SEQ ID NO: 138 - DNA, 426 bp, Artificial Sequence
  altOAC71
atgtctagttccataaccgagacacgtaagctgttcgccataactgtcttcggatataaaagagcagacatgagtgaagatgactaccacgcctacatttcaaaaacccactcagggcacttgaaagcattattagccaagaacgacatcgttagttatacaatgcagcacaacagttctgatgtaaataaaccttatcttgaaaaggtctacggcggcgaactgcccgctgaaaatgtttcagactgtgatgccgtgatccagattgtcttcaaggacatagaggattatttacgtgttcgtaccgatcctcatttcgttaacatagtatcccccgaccaccacaattttgctgaccccacaaagactagattcagtatggggtggtttgaggtgcatgtctcacagggcaaggttgtgagttaa

SEQ ID NO: 139 - DNA, 414 bp, Artificial Sequence
  altOAC72
atgtctagtgctagtatcagccaaaggctcttttcagttacaatatttggctatagaaaaccgggaatggatgaagacgcctatcacaactatgtgagtcaaacccacgccggccacctgaaagatctactggtgaaaaacaagattgtctcataccacatgcagcacaactccaccaaggctcgtgcgctaatggataggattctgcccgatattcccgttgaaaaggtggaagatgctgactgcatcgttcagatagtgttcagggacatcgaagactacgtgaatgtcaagaatgaggagcagttcaagagtgttgtgaacccggaccacgccgtcttcagtgatccaaccaagactaaatttgtcactgggtggtttgagtttcacattgctgacggcaaaattgtttaa

SEQ ID NO: 140 - DNA, 420 bp, Artificial Sequence
  altOAC73
atgtctagtgagaatggacatcaagctaaacagcccatgctgtgcttaactatctgtgcttaccgtaagggaggaatggacgaggaggcttacagaagttatatgactaaggttcatgcccccttggtccaaggcttgatggtcaagcacgggatagataaattttccatgactcataatcccctttcaacgaggagtcttatgggtcgtatttttgacccgcagttctccaatatggcagactatgactgtattgtccaagtgcaatttcgtaacatcgagcagttcgtagcactgaaggaagatcctttgtataagcaggctgtctttgctgaccacaacaagtttgctgacaccaacaggagcaaaatgaccataggttgggtgcaggattttctaagggatggtgcgctagtttaa

SEQ ID NO: 141 - DNA, 414 bp, Artificial Sequence
  altOAC74
atgtctagttctacaaatagcgagaaattgtttagcgtgacaatctttggttatcgtaaaccggggatggatgaagatttctatcacgagtacgtgagtcagactcacgcaaaccaccttaaagatttactaataaagaacaagattgtgtcttaccacatgcagcacaattccacgaaaggcaggagcttattgaatgaaatatttccaggcattccctcagagaaggtagacgagagcgactgcatagttcagattgtttttagatcaatagacgattacgttaaagtcaaaaacgaagaaaaatacaagtctgtggttaatccagaccatgatgtgttctccgacgcgagtaaaacgaaatttgtcactgggtggttcgaatttcacgttgccgatggcgaagctgtttaa

SEQ ID NO: 142 - DNA, 417 bp, Artificial Sequence
  altOAC75
atgtctagtggaaaatctcaaggtttatttagcattacaatctcagccaaaagaaaaccaggcatggatgaggatgcctatcacaaatatatatctgagactcatgcagggcacttgaaggaactgttggtacaaaagaaaattgtagattataccatgcagcataatacctcagaactgatgaaagatatcaacctgttatttccgaacctttccacgattaacatgtcacctagcgacgctttcgtgacgattgttttcagaaacgtacaggactatattagcgtgaagaatgaccctcattatttaagtgtagtcaacccagaccatgtgaattttgcagactcttccaataccatgatgagctttggttggtttgaaaggcatgttgctgatggaaagttagtggagggataa

SEQ ID NO: 143 - DNA, 390 bp, Artificial Sequence
  altOAC76
atgtctagtgggaaaagccaaggactgtttagcgtaacaatttccgctaaacgtaagccgggcatggatgaggatgcatatcataaatatattagcgagacccacgccgggcacttgaagcacctgttagtggagaaaaagattgtagattacactatggatatagaaaatttattcccgaatttgccatccatcaacagaagtccctacgatgccttcgttacgatcgtgttcaggaacatagaagactatgtctcagtgaaaaatgatcctcactatatgtctgtggtaaacccagatcatggaaacttcgcggatggaccatccacgatgatgagtttcggatggtttgagaaacacgttgcggacggaaaactagtcgaagggtaa

SEQ ID NO: 144 - DNA, 402 bp, Artificial Sequence
  altOAC77
atgtctagttatgctttcacgatacttggtttcaaaagagatgacatgacagaagatgaatatcataattatatttccaccgtgcattcagcccacttaaaagccttattagcccaaaatgatatagtatcatatacaatgcagcacaatacatcacagacgcgtgatgatttgctgaacaaggtgtatcaaggacagatgcccgcggaaaaagtatttgagtgcgacgcgattattcaggtggttttcaagacggtcgaggactacctacgtgtccgtgaagatcctcattttcagacagtcgtgaaccccgaccacgttaactttgctcatcctacgaagacccgttttgtcatgggttggcacgaggtccatgttgcggacggcaaagtcgtatcataa

SEQ ID NO: 145 - DNA, 426 bp, Artificial Sequence
  altOAC78
atgtctagtgcaaccccggaaatccacaagttgtacgctatgactattttcgggtacaagaagacggatatgacagagaaggattaccatgactacatttccaagacccacgcaggccatttaaaggccctgcttgccaaaaacgacatcgtttcttatactatgcaacacaatactgcggaggtgaacgtacccatgttagagaaaatatatgcaggtaggctaccgactggaaatataagtgactgcgacgctatcattagaatcgtttttaaggatatccaagattacttgagagtcagagaagacccacacttcgtgagcgtagtaaatccagatcacttaaattttgcggacagccaaagaacgagactagcggtcggatggtttgaagctcatatcacagcaggtaaggtcgtcagctaa

SEQ ID NO: 146 - DNA, 408 bp, Artificial Sequence
  altOAC79
atgtctagttcatcctccagagtctactgcttaactatttgcgcgtgtcgtaaagaggggatggacgaggacgagtatcaccgttatctgagtgagcatcactccaatctggttaaaggtcatctagctgcgaaagggatcttgagctacaccatgactcataatacgactgaaaccaaacagatgatgacgcagatattcggaacttaccctgaaggcgacatctgtaaatacgactgctttatacagatccattttaaggatgtcctagattacataagggcaaaggatgatccgtactataaggaggtcatattgccggaccacgcacattttgcagaccccgcaaatactgtattcgtgaccgggtggctagagacgcatgtcatcaacggagaggcagtgtaa

SEQ ID NO: 147 - DNA, 297 bp, Artificial Sequence
  altOAC80
atgtctagtcccgaagacgagtaccacaggtacttgtccgagcaccatgctgtgctagtgcgtaaccacctggtcaagatgggaatcgtgaggtacaccctgactcacaacacttctgagacgaaggagatgatgaaacgtatctttggcgatctacctgaagggcatacaagcgattgtgactgcttggcgcagatcatgttcagggatgtagaggactacgtgagagcgagaaatgacccccactacaaagaggttatatttccagaccatgcgaacttcgcggatagtagttaa

SEQ ID NO: 148 - DNA, 336 bp, Artificial Sequence
  altOAC81
atgtctagtgaggaagcaaagggagtggtgaaacacgtattgctggcaaaatttaaagagggtaccgctcaggaccaaatagatcagctaatcaaggactacgcaaatctggtaaacttaatcgagccgatgaaatcattccagtgggggaaaaatgtgtccattgagaacttgcatcagggttttacccatattttcgagtctacgttcgagtcaacagaaggtgttgccgagtatgtcgcgcacccggcgcatgtagagtatgcaaacttattcttagctaatttagaaaaggtgcttgtaatagactataaaccgactaccgttagagtgtaa

SEQ ID NO: 149 - DNA, 339 bp, Artificial Sequence
  altOAC82
atgtctagtacgattgtccatatcgttttcttcgagtggaaacctacaacaagccatgcccaagtagaggaggcatgcggtaggatgcttgccctgaaagatcaatgtctgtctgcaacatcacaaaaaccgtacatcaagtcattctccggcggacgtaacaacagtaaagaaggacatgctggaccgtttactcacggatttgtggttgaatttgaaagtgaagaagatcgtgattactatgtgagtaaagatccagctcaccaggacttcatcaagtttgctggggaactgatgcagaatgtcaaagtgttggattatgagcctggaaagttataa

SEQ ID NO: 150 - DNA, 339 bp, Artificial Sequence
  altOAC83
atgtctagtagcattactcacatcgtcttattcgaatggaaatccaccacctccccggaacaagtcgaagaggcatgtaaaaggatgttggctctgggggagaagtgcatccacccaacgtcccagcagccatatataaagtcattcacaggtgggaaaaacaattcccccgagggccgttctgatgggttaacacacggattcgtggtggagtttgaaagcgcccaggacagggactactacatccacaaggaccctgcccatcaggctttcgttcaatttgcgggaccgttagcgcaaggtgtgaaggttgtcgattatactccgggacagttttaa

SEQ ID NO: 151 - DNA, 321 bp, Artificial Sequence
  altOAC84
atgtctagtttccagttcaaagatggtgttgcggccgaggaggttcagagcgcgacctctaggatgatggatttggggaagaattgcatacattcaacaacaggcaagccatacatcaagagcattagaggcggtcgtaatatagcgaagggaaacagatccgctaatagaacacatgcctttgttgtagagtttgacaatgctgaagatcgtgactattacttagacgtggatgaagctcattctgcattcgttgaatttgtggcaccaatgctggcctctcccaacatagcagtcgattttagaaatgatgaattttaa

SEQ ID NO: 152 - DNA, 303 bp, Artificial Sequence
  altOAC85
atgtctagtatcgcgcatcatgtccttttctggctgaaagctgatacgacggatgagcaaaaggtcgcgttcaggaatggcctacagacccttgaaaacatagaggttgtaaagacttttcacataggcgtcccggcaccgatcgagagagcagttgtcgataccacctacacctttagtcttatactattctttgaggaccttgcagcacatgacgtttatcaggttcaccccgttcataaagcgttccttgatgaatttagggtgtatttcgagaaggttgtaatttacgatgctgaataa

SEQ ID NO: 153 - DNA, 321 bp, Artificial Sequence
  altOAC86
atgtctagtccaccagtttaccatgtagttctggtaaagttgaaggaggactccacacaacagcaaattcaggaatggagggatgctgcagcggcattaccaaccgcgatacccgcattgcagaaggtgataacgggggcaaagatacctggaaaccaattcggaggggactgggacgactgcattatctatgtcattgattcacgtgacaaattggctgaatacggtttgcacgaggcccatcaggcgtacctgaaactagcagcgaacattatccaggacagagtcatctttgatttcgacgctgacaacgaaatgtaa

SEQ ID NO: 154 - DNA, 312 bp, Artificial Sequence
  altOAC87
atgtctagtgttaaggtcacaaatagctggaccaaagttctagtaaaatttaaacccgaggtggacgaatccctgaaacaagaagcaattaacgagatcctggccctaaaagacaagattcctgaaattaaaaaggccacagcaggagtcaactttaccgaccgtagtaaggggtttacacatgggtgggtgatcgaggtagaaagtaaagaacatttgacaatatataatgaacatgaacaccacgttgcttttgttactaaatttcgtcccttgcttgccgatctagtagcagtcgattatgagagttaa

SEQ ID NO: 155 - DNA, 303 bp, Artificial Sequence
  altOAC88
atgtctagtactaattacattgagcacgtcttgtttctaacacttgagcccatgagtgaagaagcctgggaggacttacatgcgacctttatggctatgaaaggtcaagttccaggtatagttgatctttccatcgggaagaacatttcacctgaaagagcgcaaggttgcacgcatgcgttaagggttctattggaagatcaaaaagccctaaccgtttatgctgaccaccctgctcacgtcctattcaaaaataaactgaggcatcaacgtcctccgatttgtcttgattggaacatataa

SEQ ID NO: 156 - DNA, 324 bp, Artificial Sequence
  altOAC89
atgtctagtgccattgctcacttagtcctattgaagtttaagccatcaatatctgaggagaaagctcaggagatactaaagagccttgccgatttgcgtgaaaaactgcctgtccagagtgttcacgcggggactaatttcactcacaggaaccagggatttacccatgcgttcactatgattttcaaaagtaaagaagacttggaaacatacacgttagcggaggttcatcaggacatagcgaagaatcaagtgcaccccaacgtagataactttttagcaatagattatgaagtagctgactacagctatcctcgtatataa

SEQ ID NO: 157 - DNA, 330 bp, Artificial Sequence
  altOAC90
atgtctagtgcgataatacatattgtccttttcaagttaaaacctgagctatccgaacaggacggtaaagagttattgatggaaattatagagcttaaaaagaaggtcccagaagtggaaactgtccaattaggcgtaaacttcaaccccaggagtaaaggcttcacccatggattcactatgacgtttaagaacaaagatgccctagaaacctatgacaaaagtgaagcgcacgtggacgcagtgaagaattacttgtccccgcgtttagaggacctacttatttttgattatgaagtcgaaaattttagtattccgagaccactgtaa

SEQ ID NO: 158 - DNA, 309 bp, Artificial Sequence
  altOAC91
atgtctagtggtctaatacatatcgttctgttcaagctgaagcctacatttagcgttcagacctttgaacaggcaagcagtagtttgaacaaaatgagtagtcacatcccacaggtcaagcactcctcatttggcaagaaccttacacagcgtgggaaggggtacactcatgccgtagtagtagagcttggaagtatggatgatctgcccatttacatcgatcatccacaccatcaagcaattttgaaagacctgaaagaggtgatgatcatagaagacagtattgcagtggactatgaaacgagttaa

SEQ ID NO: 159 - DNA, 345 bp, Artificial Sequence
  altOAC92
atgtctagtaccgtaacccacatcgtgttgttaaagaaaaagccaacggcgacctcagaaagcattgacgcatttgtcaaggggataacagccttacacggggtagtgccgggtgtaattagagccactgctggggagacctttaccactgaacgtgcgcagggttttacacatttattagtggtggaactagtagatagggccgcgttacaaatgtaccaaacgcatccagaccacgtagcggtcagagataaagtaatagttccgaattttgaagggatgttggctgttgacctagacgttggggctcctgcgatagctaccggcaacttgcttgacatgtaa

SEQ ID NO: 160 - DNA, 330 bp, Artificial Sequence
  altOAC93
atgtctagtgtgttcatccacatcatattgttaaaatttaagacctccgttacggaggcggacgcgcaggaaatcctttcaaacctggctcacattaaagaaacactgcctggcgtaattgaatcagtgcaactaggaactaacttcaatccaagagcacacggttttacacatggtttcacaatgcagtttaggacgagagaagcactggataaatatgtgaaggccccggagcacgtaaatgtggctaagcagtacgtgcacccgaacatagaagaccttcttgcctttgactacgagactgctgatatttctagtccaacactgtaa

SEQ ID NO: 161 - DNA, 330 bp, Artificial Sequence
  altOAC94
atgtctagtgccgtggctcatatcattctattaaaggttaaacctagccttacagaagaacaggcgcatgacatactaaaagccgttgccgcgctgaaggatcagttgcccggggttgtggaaagcgtacatctgggggtaaattttgctgccagggcaaaaggatttacacatggttttactatggtattcaaggacaaagcggccttagaaacgtatgataagagcccagaacacataaaggctgtccaggaaataataagaccaaatatcgacgacatcctggcctttgattatgaaatagaggattacagtatcccacgtctgtaa

SEQ ID NO: 162 - DNA, 330 bp, Artificial Sequence
  altOAC95
atgtctagtgcttttatacatatcattcttttgaaattcaaggagtccgttactgagcaggacgctcaggaaatacttagaaacctagctaacattaagaataccttgccaggcgtaatcgaaagcgttcagcttggcgtgaactttaaccacaggagcaaaggattcacgcatggcttcacaatggttttcaaggataggtccgcactagatacctatatcaaggccccggaacacgtaaacgtagcaaagcagtatgttcaccccaacatggaggacatcttagcgttcgattacgagactgcagatttctcagctccaacgttataa

SEQ ID NO: 163 - DNA, 330 bp, Artificial Sequence
  altOAC96
atgtctagtgcagttatacatatcgttctattcaaattgaagtccgagttatctgaacaagacggcaaggatttactgaaagctattattgaattgaagaccaaagtgccggaggtggaaacagtgcagctaggtgtaaatttcaaccctagatccaagggtttcacgcatgggttcactatgacgttcaagaataagtcctcattagacacctacgataagagtgaggcccatgttgacgccgtcaaaaactacctttcccaccgtatagacgacatccttatctttgattacgaagtagaggattttagcatccccagacccttataa

SEQ ID NO: 164 - DNA, 303 bp, Artificial Sequence
  altOAC97
atgtctagtgctatattacataccataatctttaaagcaaaggacgacgtaaaacaagagcagatagataaggtactaaaggcgctaggcgatcttggaaaggttattcccaacctaagtaattttaagtgtggaaagaattttagtgacagaagtaagggtttcactcactcctttcaagtagaatttccgaataaagatgcgcttcaagtttaccaggtacaccccgaacatgttaaagtcagggatacgatgcttaaaccaatcgcggacgatctaatgtgtatcgactatgagttctaa

SEQ ID NO: 165 - DNA, 303 bp, Artificial Sequence
  altOAC98
atgtctagtactaaagtcgttcacatagtcatagtgaagttcaagcctgaagtgacagaggaggtgaaacagcaagcaattagagacgtgatagctctgaaggaagtcattccagagataatcaattgttctgctgggacaacttacacggacaggagtaaggggtatgagcatggttgggtggttgagctagagaaagaggagcacttaccattgtacgccgagcatccgtctcatttagattttgttaagcaatacaaacctctgttcgccgatctgatagccctggactacgtttattaa

SEQ ID NO: 166 - DNA, 327 bp, Artificial Sequence
  altOAC99
atgtctagtaccgtgcagcatgtggttttgctaaagtttaagccggataacacggagcaagatggagaagacatacttaaagccattgcagggttgaaagataaagtttcagaaattatttccgtccagttgggtgttaataaaaattcactttccaaaggttttacgcacggcttaactatgaccttcaagtctaatgaggatttagaccgttatgagaagtccgagccccatataaaactattggaaaactacctaagaccaagactagaagacattctgatattcgactacgaggtagaggagttctcctatcctagcccttaa

SEQ ID NO: 167 - DNA, 297 bp, Artificial Sequence
  altOAC100
atgtctagtgccgtcgagcacgtcgtttttcttaaattaaagcagatgaatagcgaggaatggagaacaatctctgaaacgttccacggtatgaaaaacaagatccccggaatcctagatatgagcataggatctaacttcaatgcggaacgtaacaagggttttactcacgctctaagagtgaaattccaggacgagcaaagtcttcagaagtacgcagatcacccacttcaccttcatttcaaaaagttattagtacatgagtccgacccgatttgtttagactggaaatgctaa

SEQ ID NO: 168 - DNA, 324 bp, Artificial Sequence
  altOAC101
atgtctagtgctgttatccatatcgtattgataaaatttaagccggaggcgaccacaagcgaaagacaagccttgatgactgaaatgaatacgctgcgtgacattccatgtgtcagaagtctgagtttcggagagaacttcacccatagaagtgaaggttatacccatgctcttgttgtaggggtggagacaaaagacgacgtggtggcctacatgatacacccgatacaccaagccttttctgcaaaattggccacattcgccgagagcagacttgcagtagactttgaagatcaagcaataccggcggcagcctccatttaa

SEQ ID NO: 169 - DNA, 843 bp, Artificial Sequence
  altOAC102
atgtctagtggtcacgtcgtcgatgagagtgcaatctgtcccgcctccatcttcattgatatggcgtataccgctgcagtgtttttagagcaggagaacggggcaggagcagccttgaacacctatgagctaagcagtttagaaatgcacagtccccttgtgttgcgtgaggatattgaagtattgccgcaagtgtgggtggaagctgttttggatataaaaagtaacgctgtaagtgtccactttaagggacagacgtctaagggggcagtaggttacggctcagccacaatgaggttaggccagcctgacagcgccgttaggagagattggtcacgtatacagtctctagtcagggcgagagttcagacccttaacaggagtgtgagaccaagggaagtccacgcgatggataccgctctgttctataaagtattttcagaaattgttgattattctgcaccatatcatgccgtgcaggaagcagtcattgctgcagattttcacgacgctgcagtaactttgcagcttacaccaacagccgatctagggacttttacatcctcacctttcgccgttgacgcgttagtccatgttgcagggttcttacttaatgccgatgtgagaaggcccaagaacgaagtccatatcgccaatcatattggctctctacgtatagttggtgatctttcatcccctggcccttaccacgtgtacgcaacgattagagagcaggatcagaaggcagggacaagtttgtgtgatgtctacacgactgactcccaagacaggttagtcgcagtgtgctccgatatttgcttcaaaaagctagaaagagactaa

SEQ ID NO: 170 - DNA, 714 bp, Artificial Sequence
  altOAC103
atgtctagtgcaagttatatacacttgaaagccttacctaaggggagaaggatatacgccctggaaagcccttttcttgagcaaccggaacttttcgatctatccattgaggaaatggcaactattttcctgcgtactattaggaggatacaaccccatggcccttatttaatcgggggttggtcagcggggtccatgtacgcctatgaggttgcccacaggctaaccagggagggagaaaccattcaagcattaattatacttgatatgcgtgcgccttccctgatccctacttccattgttacaactgactttgtagacaagttgggcacctttgaaggaataaatagagccagggatttgcctgaagacctgtctgtcaaagaacgtgcacatttaatggctacatgcagggcgctttcaaggtacgacgcgcctgccttcccatccgaccgtcagccaaaacaggtggccgtagtttgggcactattaggtttagataatagaccagacgcgcccatagcttccatgggccgtcccggcctagatattggtaagagtatgtatgaaatgaatcttgacgagtttgaaagatacttcaattcatggttctacgggagacgtcaacagtttggtacgaatggctgggaggatttactaggcgaccatatcgccgtttatactgttaatggagaccatttttcaatgatgtaa

SEQ ID NO: 171 - DNA, 516 bp, Artificial Sequence
  altOAC104
atgtctagtcaaaagtttattaccgggcacgctgttcttggccagccattgtgtcccgccccactttacatggagctggcgagtagcgcgattctgatattggaaaactataaactgtaccaagacgcgcctatgcttccccaagtccaggacctagaaatcaaggctcctttgggaaaggccctagacaagtccgttgcccttattatcttgaaggcagacggagagagttggctttttgagttctcctcacaatcccccacgattagaaggaatagctctcaacccgtgattcacgctactgggaaaatactacttagagatacatttcctacgtcaactcttcgtactgagcgtctgataccgcacacgaggttgactgcaatccagagtgacgccaaggctaagaaattgcagggaaggcaagtctacgataggttcagtagagctgtaacatatagcgagatgtataaaggggtcagggacgtatatgccagggatcacgagatagtataa

SEQ ID NO: 172 - DNA, 882 bp, Artificial Sequence
  altOAC105
atgtctagttcaaaagagcacatctttgaaacagatatgactaccttgggtcctctaatatctggacacgacgtgggaggcagtcccatttgtccggcttctgtattccatgagcttgccttagaagccgcaaagtccgttttggagcccggtaaggaggatatacttgttgtaaaagggatgaaattttcatctcctttaatctttctttcttctaccagcaatactaccgtccatgtccatatatctaaaaagggaatagctaccacgcgtacagccagcttccatgtgaaatcaacctctcctgccagccccgttgaatcccttcattgtagcggctacgtcaccttgcaaaatcttgagcaacaatccgggcagtggatgagggatcatgctttggtcacaagacaggctaggctgtttagcggagcagggaaggaccttctatctactttcagaaggcgtgtgttatatgagaacatctttactagggttgtgcgttattccagggactaccagacattacagttccttgacgttgcggactccaatttggaaggtatgggctccttcaacatgccttctgacagtatcgcacagactgagacagcttatattgctcacccagtgtttaccgatacgttgttgcacgcggcaggcttcatagcaaatcttgcaatcggttcaaatgaagtgggaatctgttcagcagtcgaaagcatagaagttgcgtatcacgaaattaattacgaagacaccttcaaaatatattgttcactgctagaggtcaagggactaatagtagcggacagttttgcgttagattcatctgacaacatcgtcgcagtgataagaggaatggagttcaaaaagttgcaataa

SEQ ID NO: 173 - DNA, 423 bp, Artificial Sequence
  altOAC106
atgtctagtccgttgtgcttattccatgatggaagcggtcaaatctcaatgtacaagagactgcaaggtcacgacagaaccacatacgctttcttcgatcccaaattcgagtgcagcgacgagggtcgtagtttctattcctctatcgaggatatggctgaggactacgcctcccgtatcctgagcactagaccccctctatccagcctgatcctgtgtggttggagttttggcggtatagtagcactggaggtggcccgtctactgttcttgagaggtattgaggtaagaggcttggtcctgattgatagtccatccccaatcaatcacgaaccattacctgctcagattatatccagcatcactaggtttacgggccgttctgagagcacgaacgcacttgaggaagaatttctttcataa

SEQ ID NO: 174 - DNA, 1032 bp, Artificial Sequence
  altOAC107
atgtctagtctgactaaaggcagcagcatgtctgcagcgtctgcttctttgcagcccacgttcctgacgacttccgctcaaagggtcgtggaatccagggacgatgggttgaccgcgacagtggttgtgcataatgacatagctgaccccgaccttaatcgtgtcattcagggtcataaagtcaatggcgctgcgctttgcccgagttctctgtatgctgatagcgcccagacactggccgagtacctaatcgaaaagtacaagcccgaattaaaaggtagtgggcttgatgtgtgcaatgtgaccgtcccgaagcctctaattgcgaagacaggtaaagagcaatttaggatctctgcaacggctaattgggtggacaaacatgtttctgtccaagtgttcagtgttaccgccgaggggaaaaagttgattgaccacgcgcactgtgaagttaaactttttgactgcatggcggcggacttggaatggaagaggggttcatatctggtcaagcgtagcattgaattgttagaaaacagcgcggtaaaaggggacgcgcataggttgcgtcgtgggatggtttacaagctatttagtgccctagtggactacgacgaaaattaccaatccataagagaagtgattttagactcagagcaccacgaggcaacggccctggttaagtttcaagcccctcaggctaattttcataggaatccctattggatagactccttcgggcacctgtccggttttattatgaacgcgtctgacggaaccgattccaaaagtcaggttttcgttaatcacggttgggattcaatgagatgtcttaaaaagttttctgctgacgtcacatataggacttacgtcaggatgcaaccttggcgtgacagcatttgggctggcaatgtctatattttcgagggcgatgatattatagccgtttttggtggagtaaaattccaggcgctaagcaggaagatcttagatatagcgttgccgcctgccgggcttagcaaagctcagtaa

SEQ ID NO: 175 - DNA, 1092 bp, Artificial Sequence
  altOAC108
atgtctagtggagcagtcgtccaagcacgtgcgttgaggctgtccgatagtgtacataacgttattgagcaggtgcacggtgataagaggtcctcaattactgttgaatcagatatgcacgaccctagtctattggccattgcccagaaccatagagtgaatggtctgacaatggccccctccacgctattcgcagacatcgcattcacattggcaaagcacttgatccaaaatcacggtctggatacgcacactaatctaccgagcattaacaatatggcagtcgagaaggcgttgatagtgggggaaactggcccacagttgtttagggcaagcctggacatggattggacgaccatgagagggtccgtcaggatcttctcagtcggagctaacggaaaacaaacgactcttcacgctgtgtgtgacgtagccgtggaaaatccatctagtcacagagagtcatggcaaagtaacgcttatttaatccagagagggatcaagcaattagttcaaggtgcatcagacggtagtgcccacatgatgagaaggggcttactatataagatattttccaatagcgtgcaatacggctcagcgtttcagggcatcgaacaagtgtggttcgacagtgaggggcttgaggggactggaaaagtttttatgccctcagggaaagatactttcgcgttaaatccttactgctgcgactccttaggacatatcacgggatttatcatgaattgttctgattcattagatcttgacgatcatgtgtacatcaaccacggctggagaactttgagattggtggagccatatcagtgtgatgtccagtatcagacttacgtaaagatgcaagctgttgggtccgatgacagtacctactctggagatgttcacgtattaagagatggcaaaataataggaatatgcggcggcgtgaccttcaagaaagtcgctcgtaaggttcttgaaatgttactaccgaaaccatctggcgcaaaagcgaagcatggggtagtgaagcacgtcgccccggaaccggtgaaacacgttgtgctgacgccgccatcaacgacctctcactaa

SEQ ID NO: 176 - DNA, 348 bp, Artificial Sequence
  altOAC109
atgtctagttcaacagtcaccattagtaagacggataagtacacttttattaatgtgttcacgctacatgatccggcaaatcaacagaagctagtagatataatgtcctccctgatggccggacctggaaaaagtgtacctggcttcatttcatccgcattgcataggtctcatgatgggacaaaagtcgtggtttattcacaatggagtagtaaagaggctggtgaatctctgaggtctattgaagagcttagaccgtatggtatccaagcaatggaaatatcatctatgacacctgtaatgtatgaggttgcagatacctttgtgggtcccgattacaaacgttaa

SEQ ID NO: 177 - DNA, 408 bp, Artificial Sequence
  altOAC110
atgtctagtagtaggtttgctctagtggtcgtctccgctttcgtttgctgcctggtaatcgctgccagaccgcatagcgccgccgccgaggggaaaccgggaatggtgcttcgtcacatagtaatgtataaatttaaagacgatttgaaacctgagcaggtccaggaagtggtcgatacgtttgccgcgttaccttcaaagatcgacgtcattgttggttttgaacatggaactaacgtctctcaagaaggaaaatctgagggcttcacgcatgtctttactgtgactttcagagaccaggcaggtcttgagaaatatcttgtccatccagcgcaccttgattacgttaaagtagttagggacagacgtgagaaagtagtggtttttgactactggaccaaggagtaa

SEQ ID NO: 178 - DNA, 306 bp, Artificial Sequence
  altOAC111
atgtctagtataagacacatattgctgattaagtttaagccggaaattactcaggaacagattgaggaacttatggccatgtttgtatcaatgactgacaaggtgaacggcgtcactgatgttgagtggggtgagaataactcaccggaagggaagaataaggggtacactcatagcgtgtttatgaccttcgcagacgaggccgggagagacaactaccttccgcatcccgaacatgatgccctgaaaaatgtcttcaggccgattttagacgatataattgttttcgactatcagcccgcataa

SEQ ID NO: 179 - DNA, 312 bp, Artificial Sequence
  altOAC112
atgtctagtataagacatatactattgattagattccaggaaaagataaccgccgaacaaattagtgtagtcaagaccatgtttctgagtatccctagttgtatcccaggtgttgactcagttgaatggggcgaaaataattcccctgagggcaagaatgcggggtatactcactgcgtaatgattacctttgcagacgaaaaggctaggcaaaggtacttgcctcaccccgatcacaaggctattcagtctgtttttagacagattctgagtaacattattgtattcgactacgaacttatgcgtaaataa

SEQ ID NO: 180 - DNA, 447 bp, Artificial Sequence
  altOAC113
atgtctagtcagacaaatttattcccgacttcccatcttaatataaaaacaattgcgagtgcagctttattggtagctatcgtttcatcattagtcttacattcaagttctggcaacttgcgtggtgctgaggcccgtgcccctgaaaagctgcttagacatatcgtactatacaaatttaaagaaaccacgacgccagctcaagttcaggaagtaatcgacacgtttagcgccctaccgaagcagatccttcaaatcgcagacttcgagtgtggctcaaatgtgagtcaagaagggaagagtgaaggtatgacccaagcgtttgtagtaagtttcagaagtgaggccgatttgcaaacttacttaacgcatcctgcacatctagcttatgtgaacgtggttaaagataaaagggaaaaagtgttggttttcgactactggaagtaa

SEQ ID NO: 181 - DNA, 327 bp, Artificial Sequence
  altOAC114
atgtctagtaatcctaaattaccgcttttgcgtcatgtggtactattcaagtttcgtgactcaagcacggaagacgaagtggagcacgtagtctcttcttttatgtccctgaagaatcaggtaccgcagattgtggcgatggaatggggccgtaacatatcagaggaaaaccaccaccaaggctttactcattgcttcatcataagctacgaatctatccaggatctaactaactaccagaagcacccagctcaccttgacttccagcaaatcctgggtccacatatggagaaggtatttgtggtcgattactacagcaatgactaa

SEQ ID NO: 182 - DNA, 336 bp, Artificial Sequence
  altOAC115
atgtctagtgccgaagctaagggcacagtcaaacacatcgtactagcaaagttcaaagatgaaatctcagaacaacagatcgacgagctgattaaagggtatgccaatcttgttaatctgataccacaaatgaagagttttcactggggaaaggatgtcagtgctgaaaatctgcatcaaggtttcacgcacgttttcgagagtacttttgacagtgtggaagccatcgaggaatatgtggcacacccctcacatgtggaatatgctaacttgttccttagcagtcttgaaaaggtgatcgtggtggactacaagccaaccatcgttaatctataa

SEQ ID NO: 183 - DNA, 345 bp, Artificial Sequence
  altOAC116
atgtctagtgaagaagccaacggcgtagtcaagcacatttttcttgccaagttcaaagacgacattccatcaaaaaggattgaagaacttatcaagggattcgccaatctggttaatcttatacccccaatgaagtcattttattgggggagggatatctctgcggaaaacttgcaccagggattcacccacatatttgaatccacctttgagagtatagaaggcattgctgaatatattgcacaccccgctcatgtagagtttgcgaatctacttttaccctcattagagaaacttatcgcgcttgactataaaccgaccacagtccacctaagtcttgattaa

SEQ ID NO: 184 - DNA, 336 bp, Artificial Sequence
  altOAC117
atgtctagtgaggaggcaaagggagtggtgaagcacgttctattggcaaaattcaaagatgaaactacggcagagaagattgaagagttaataaagggatatgccaatctagtcaacttaattgagccgatgaaagcgttccaatggggaaaggatgtgtctatcgaaaacctacaccagggtttcacccacgtcttcgagagtacgttcgagtctactgaggggatagctgaatacgttgctcacccagttcacgttcagtttgccaatctgtttcttggccatttagaaaaagtcctagttattgactataagcctactattgctagatgttaa

SEQ ID NO: 185 - DNA, 342 bp, Artificial Sequence
  altOAC118
atgtctagtgagggcgcaaaagcaggaggagtagtaaaacatattttgttagcaaagttcaaggacgagattccgcaatatcaaattgatcagatcattcaaggctatgcaaaattagtccacctaatagaacctatgaaggctttccactggggtaaagacgtatccatagaaaacttgcatcaaggattcactcacatatttgaaagcacctttgaaagtgtggaaggaatcgcggcatacgtgtctcacccagcccacgtcgaatttgcgaatatatttttgggctttctggagaaagttctagtggttgattataaacccatgcccgttcagttgtaa

SEQ ID NO: 186 - DNA, 327 bp, Artificial Sequence
  altOAC119
atgtctagtgaagaggcaaaaggcgtggtgaaacatatagtcttggcgaagtttaaggatgacattactgccgaaaagatagaagaacttatcaaaggctatgcgaacctggtcaacctagtccctcctatgaaaagtttccactggggaacagatgtatccgccgaaaatttgcatcaagggttcacacatgttttcgagtcaacatttgagtctacagaaggcgtagcggaatatgtcgcgcatccagcccatgtcgagtttgccaatttattcattagtagtaccgagaaagtaatagttattgactacaagccaactatttaa

SEQ ID NO: 187 - DNA, 312 bp, Cannabis sativa
  csOAC
atgtctagtgcggtcaagcatttaattgtcttgaaatttaaagatgaaatcactgaggctcaaaaggaagagtttttcaaaacttatgttaacttggttaatattatccccgcaatgaaagacgtttattggggtaaggacgtcacccaaaaaaataaagaggaaggatacacccatattgttgaagtgactttcgaatctgtcgaaactattcaagattatattattcatccagcacatgttggatttggtgacgtgtatagatcattttgggagaaattgttgatttttgattacactccaagaaagtaa

SEQ ID NO: 188 - DNA, 1170 bp, Artificial Sequence
  Maltose binding protein gene
atgtctagtaagattgaggagggaaaacttgtcatatggattaatggcgacaaaggctataatgggttagcagaagtcggtaaaaagtttgagaaagacactgggattaaggtaacggtcgagcacccagataagctggaagagaaattcccacaggttgccgcgactggggatggccccgacatcatattctgggcgcacgacagatttggcggttatgcacaaagtgggttactagctgaaattaccccagataaggcatttcaagacaaactatatcctttcacttgggatgcggttagatataacggaaaattgatagcctatcctattgccgtggaggctttatcactaatctataacaaggacctattgccgaacccgcccaaaacatgggaagaaatccctgccttagacaaagaacttaaagcgaaaggcaagagtgctctaatgttcaatcttcaagagccttattttacttggcccttgatagcggccgatggcggctacgccttcaagtacgagaacgggaagtatgatattaaagacgttggagtggataacgcgggtgcgaaggctggcctgacgttcttagtggacttgattaaaaataagcacatgaacgcggacacggactacagcatcgcggaggcggcttttaataagggcgaaactgctatgacgatcaatggaccttgggcttggtcaaatatagatacaagtaaggtaaattatggagtaactgtgctgccgacctttaagggccaacctagtaaaccgtttgtcggcgtgttgtccgccgggataaacgccgcctcccccaacaaagaattagcaaaggaatttttggagaattacttactgaccgatgagggcttggaggcagtcaataaggataagcccctgggcgctgtcgcattgaagtcatatgaagaagaacttgcaaaagatccccgtattgctgccacaatggagaatgcacagaaaggtgaaataatgcccaacataccgcagatgagtgcgttctggtatgcggtaagaacagctgttatcaacgctgcgtccgggaggcaaacagttgatgaggctttgaaagacgctcagaccaattcctccagcaacaacaataataataacaataacaacaacttaggtatagaaggtagataa

SEQ ID NO: 189 - DNA, 726 bp, Artificial Sequence
  VEN sequence
atgtctagtgttagtaaaggagaagagttattcactggcgttgtacctattctggttgagctagacggagatgttaatggccacaaattctccgtatccggggagggggagggcgatgcaacatatggaaaacttacgctaaaactaatctgtacgactgggaaactacccgttccgtggcccacattggttacgacacttggctatggcctacagtgtttcgctagataccctgatcatatgaagcaacatgatttctttaagagtgcaatgccggagggttacgttcaggaaagaacaattttcttcaaggatgacggcaattacaagacgagggccgaggtaaaattcgagggggatacgctggttaacaggatagaattaaaaggtatagattttaaagaagacgggaacattctaggtcataaacttgagtacaattacaactcccataatgtctacataacagcggacaagcagaagaatggtataaaggcaaattttaagatcagacataacattgaagacgggggagtccagttggctgaccactatcaacaaaatacccccattggggacggtccggtgttgcttccagataaccactatctttcttaccagtcagccctatccaaagacccaaacgagaagagggatcatatggttcttctggagtttgtcaccgcagcagggattactttggggatggacgagctatacaagtaa

SEQ ID NO: 190 - DNA, 360 bp, Artificial Sequence
  MST, co-folding tag
atgtctagtgctatgttctgcactttcttcgaaaaacatcatcgtaaatgggacattttactagagaaatccaccggtgtgatggaggcgatgaaagtgacatccgaagaaaaggaacaactgagcacagctattgaccgtatgaacgagggcctggatgcttttatccagctatataacgagtccgaaatagacgagccccttatccagcttgacgatgacacagccgaattaatgaaacaagctagagatatgtacggtcaggagaagttaaatgaaaaactaaatacaatcattaagcaaattttgtcaatctctgtatccgaggagggagagaaagaaggcagcggatcaggataa

SEQ ID NO: 191 - DNA, 291 bp, Artificial Sequence
  OSP, co-folding tag
atgtctagttatcttctagggattgggcttattttagcactgattgcctgcaagcaaaacgtttcttcactagacgagaaaaactcagtgtcagtagaccttcctggtgagatgaaggttttggtcagcaaggaaaagaacaaagatggcaagtacgatttaattgctaccgtggataagttggagctgaaaggaacatccgacaagaacaacggctctggggtacttgaaggagtcaaggccgataaaagcaaagtcaagctaacaatttccgacgacgggtctggataa

SEQ ID NO: 192 - DNA, 534 bp, Artificial Sequence
  OLE, co-folding tag
atgtctagtgcagacagagataggtcaggtatctatggcggtgctcatgcgacgtatggccaacagcaacagcaaggaggaggcgggagacctatgggcgaacaagtcaagggcatgctgcatgacaagggccctacggcgtcccaggccttgacagttgctaccttatttcctttaggagggctgcttttggtgcttagtggattagcccttactgcttccgtagtcggtctagcagtcgcaacgccggtctttttgatcttcagtccggtgctagtcccagcggcattgctaatcggcactgccgtcatggggttcttgacctccggtgctctgggtctgggtggtttgtcctctctgacctgtctagcaaacactgcgcgtcaggcttttcagcgtacccctgactacgtggaagaagctcatagaaggatggctgaggcagcagcgcatgccggacataagacggctcaggctgggcaagctattcaaggcagggctcaagaggctggcgctggtggtggggccgggtaa

SEQ ID NO: 193 - protein, 2517 aa, Artificial Sequence
  PKSC1A
MSSQAPAPSRDDIAVVGLSCRFPGEADTAEHFWDFICNGRNAYSENPDRWTPDAFHYGEKKINTSLPRGGHFMKQDVAAFDANFFNLSKVEAESMDPQQRIIMEVTYESMESAGLRVDQLAGSRTGVFMASFTSDYREMLYRDAETAPLYTATGTSNTSTSNRVSWFFDLRGPSFTVNTACSSSLVACHLACQSLWSGETESAIVGGTSLLLNPDMFLYLSNQQFLAPDGQCKSFDESGDGYARGDGIGVVILKRVADALRDGDPIRAVIRGSGCNQDGHTKGFTIPSVEAQASLIAETYRNAGLSLAETRYVEAHGTGTQAGDTREMEGIARTFSQHRTASDELLVGSVKANIGHLEACAGLASLIKCVYILETGVIPPTPSVRVLNPKIRWEEWHLKVPATQTIWPTEGLRRISTQGFGYGGTNAHLILDDAAHYLEARKLRGHHYTRTHPQTRRLLTSAMHEAVSNDQPPRLFLFRANDREGLGRVRSSLAQHLEQLLKSWPQDSRDGGAYLHNLAFTLASRRSHLQWQTYATASTPSELLQALQHEGGAWAAPETRLAASPPRLGFIFTGQGAQWARMGVELMAYPVFRQSVEASDEFLRSALGCPWSAVDELAKPPATSRLSEAAYSQTLCTVLQIATVDLLEDWNVCPTRVAGHSSGEIAAAYCLGALTKHDSLRVAYYRGILSSEMQQTHGDRKGAMMAVGASPEEVEAWLAKLTRGRVVVACINSPTSVTASGDAAGIDELLAMVQQAGVFGRKLQVDVAYHSHHMQSVSSAYAELLKDLAPLPARPGRTMHSSVLGRVIDAAELGSSNWVQNLVSPVRFSEAVSSLLSAGDKPAVDVLVEIGPHAALKGPVQQILQAQGVSAVKYTSVLSRGQSAVKTALACAGELVLSSVPVAMSRVNLESGPPPSPLVDLPPYPWNRSTRFWAESRLSREYRLRKHARLPLLGSPCPTMGARERYWRGMVRLEEEPWIRDHEIQGSILYPGAGFLIMAIEAASQQAGEQRKVSAFRLRDVHLDAALVVTEDSTAEAILQLRPHLLAPGSSQSSWMEFTVNSSIDGGDLRQNCSGLIMIEYAADADSAMDRERALESDMVCDWYKKTYVSCQQSVDVGKFYSRLASLGLVYGPTFANVTEIRRTGQGQCIGAVRIPAVDSLVPPAYRSHPHVIHPGTLDAVFHLAFAALEDSLLPGPMVPTTIDELVVAADTPNTPGTLLRGVSRSSPHGFRELISDIDMLDDQSSRALVQIKGFRCADVSGGRMTSSEAASAESRPIGFRLEWKPAIDLLTGEQLRTHLDRRVKQEGASNVARATELNNHVHHLEETLPRVAVDPAMANLSDWLSAKSAKLTNGAASSSKRPSPGGDMLAMRDALTAVRAGSIPSPEQQDRMLREVEQNGALSILFKSLDAYIDLRHHAKPNLSILELSLDSVPYSVFAALPSRHKILQTAQYAISVSQEGVADRVRAQFGSQASDIDVSVTDFTKKLDEGLGKHDVILIFDPGFVHAKLEVVLRNARKLLNPGGRIVVAEVGEPGLYLGTALGCLQWTRNLDVAQSSSSWTSCLARSGLTPALKLIDMDTESAVHGHFRLSLTGNAAESTNSDNRQPQQVTLIESANPSATAQGIAAAVAQNLDKASIPTKRVRWGSDVSQLKGQPCIVLTDLESALLKDPAPEDLAALQSLFSHAESTLWVSGPLGPDAALITGLSRSVCNEAADVHIRTLEVAGLPGPGADSYADLVTRVFRYSGPDTEFRWHSDALLVSRLVEDEARNKEIAQLLGQGEKAAVATTLQEKPEGLKLCMRQIGMLDSVCFEPDLLALEPLEAGEVEVDVKASGVNFRDVMVALGQIPDRAFGFEGAGVVRRVHAAETRLRPGDRVVFLAHGAHRTVHRVRADYAMPMPDTMSFEEGAAILLVHTTAWYALVKSARATAGQSVLVHAAAGGVGQAVLMLARHLGLQVFATVGSEEKRKLVHETYGVPHDHIFNSRDASFAMGVKRMTKGRGVDIVVNSLAGEALRQTWHCLAPFGTFVELGMKDILDNARLDMKPFLQDATFVFFNLNRVQKERPDLMGEALRETMALVRSGALKPATPLTSYPASQVEAAFRKIQTGQHLGKLVLTFQAGDVVPVVRPDLSLSDSGTYLLVGGLGGLGRSLARLLVQLGARRLCFLSRSGAASSEARALVKELEMQHRVRVLVCKGDVSDADTVSRVVQQCRAALGPIRGVIQCAMVLRDGLFERMAHDQWTESTRPKVQGTWNLHEQIPVSDFFITLSSFAGVFGSRGQSNYAAAGAYEDAMAHHRESLGQRAITIDLGIMRDVGVLAENGITDYLREWEEPFGIREPEFHALIKSAIMSTTQPLTERSVVQIPTGLATARSAQAAGISTPFYFDDARFSILAQTRTSAGASSAAGSGDADAGKVSVRTQLSQAHSVAEAAAAVQTVLLERVARTLQSSVAEIDPSRPLHSYGVDSLVAVETVKWMFKTLDAKLTVFDVLSNVSITALCEKIASMSTLVKLN

SEQ ID NO: 194 - protein, 1708 aa, Artificial Sequence
  PKSC1B
MSSKLRVANFLLFGDQTVEKLPAIRHLVSHGASSPLVQRFLRQLCDAVQLQVSKLPLHSEQRSNIGNFDSILRLAENNARLEEPNEIIATVLMNIARLGELILYAEQDPTVLASKGNRNCILGFCTGEVAAAVAAVAQDTNELVELGVEVTHIIFRMARELNRRSLMVDRTNGPWARTILGISVDRVREILQDFHENQSIPRARQVCIGFVSDGWLTLFGPPTTLQRLLEWSAELEDAPQIDTDARGGVHMETLPEVDPDRILGSSPWLDRAPVHTATIISPYTCKPRQQKTLRGLLEEIIADVGQRTLNLATSMNAALELAQADKIRLVMPGYTSHDVYFQKLLQKRGIEYSVMSHGDHLSSGPSRQGSGLVAVVGMSGRFPGSGDINAFWEGLLEGKRYIQEIPNTRFDLEQWYDATGKQKNSTMARTGAFLDKPGMFDNRLFDMSPREAMQTDVQHRLLMTTSYEALEMSGYYPDGTLSTNKDRVASFFGQTSDDWREVVVHQGVDIYFATGSCRAFGPGRLHHHFKWGGPSYSVDSACSSSIAAVGLACSALLGRECDMALAGGGSLLLSPSPFSGLSRGGFLSAHGGCQTFHDNADGYVRGEGVGVVVLKRLEDALDDQDNILGVVRGSGRNYSSDASSMMHPSANAQKKLYCDVLEQSGVEANSISYVEMHGTGTQAGDFMEMSSVLSTFAEKRGSDNPLIVGALKANIGHGEAAAGVCALIKTLMMLQSRQIPPQPDLPGPINHRFPDLAARNVYIAARNMRLEASPVAKGTLRVFLNSFDASGGNSCLLLEEAPPRAVKDADPRGHHVVTFSARSQKSLISIKERYLAHLRQHPGTKLADLAYSTSARRIHGLLRYAIAASSIDEVVQCLETDLAQGKTPRQPPATPTVVFTFTGQGAHYVGMGANLWETSATFRNTLHDYQTMASAQGLPHFLHLITDSSTPAPQSGPDTVQVQLAMVSLELALAKLWRSWGIQPAMVLGHSLGEYAALCVAGVLSVSDTLYLVAKRAQIMAGALTPHEYGMLAVNLSVADTREVLSSGQHTSCAVACINAPKMTVVSGLRSKLDDLQDQLKSDGTRCTPLSVPYGFHSSQLDPILGQFEEACQGVTFSAPNVPVVSTLLATTVREEGTFSPEYLARQAREPVDFVGALGAVQEHKFPSLTFLEIGPDPVCSGLVNATLGADEAALRCVASMHRGKANWASISCSLRDLYTAGAAIDWPAHHRDFKSSVSLLDLPKYSFDEKEFWASFPDRDLQTIGDVETKHSQPPAIVPSVQGYCTTTLQRITRETIEPDGLSVTFSSDLADQHLRAAVRGHAVADVEICSSSLLLDMALSAAQYAYMKHSPGQKMPVPLTVRNCYFHRGVVLTDKAQTVEVTVTLTSSAKTADIRYHCRTPDEYYEVGACQVVLKPASKPDQAGFLVRSRMAALKASASHRLGRRAVYRLFDNVVRYSEQYQGLENVHLSEDMQDAVAEINMAQVPAAGGHYLHHPFLLDSIVHLSGFLVNNGLRYSSEWACLSTGFDEWHLLKPLDPTTVYTSYTFMEDSRSTSNLVTGDVYVYDGEELVSVLTGLQFQKMKRTALTHLLSPPTIGNMAAKPSTRMPTMAQTELLPVPTPPATASVDDGEGEKFDLVNTLFSIIAREVGVEPSDLEGDVNLANLGIDSLMAITIISVMQQETGVELPGTFFLDNATTTAVIAAVG

SEQ ID NO: 195 - protein, 377 aa, Artificial Sequence
  PKSC1C
MSSAVTVWQDALNIIAQESGLEPAEIIETDDTAFLTLGINQILATAILAHLRGPRGEPLPRDIFDQKPTVGAFRRFYETPIHLDIAPVAAPAPPKLKRVPSSSVPLSIVLQNNPASSRHTVFLLPDGSGSAMAYANLPPVHPAVCIVGMNSPYLRDAGSYRCSVEDLASQWVREVYRRQPRGPYIVGGWSAGGYYSYEVAKRLLQDGHAVAKLILIDSPCRTVFESLSMEVVNYLSSRNLMGNWGSPEMPEWLVQHFRSTLAAVGKYRPRPIDSAGEMQTYIIWSRDGVLDQDALARSGLDTSVKVSRFLLQGKDDLGPNGWDDLLPSKDMAIATQSGTHFTMINKPHVAQMSDLLRDAVIGIGSDRQAHWQRVSQS

SEQ ID NO: 196 - protein, 2509 aa, Artificial Sequence
  PKSC2A
MSSATTNEVRWAQDIAIVGMSCRFADDADSFPRFWDFICNGRYAFHYPGKKTNTSLPRGAHFFKDDIAEFDANFFNISKVEAESIDPQQRMVMETTFEALENAGITIDKVAGTRAGVWMANFTSDYREMLYRDSETAPMYTLSGASNTSTSNRVSWFFDLKGPSFTLNTACSSSMVATHLACQSLALGESSSAIVGGTSLLLNPDLFLFLSNQHFLAADGKSKAFDASGDGYGRGEGVAVVVLKRVADAIADGDPIRAVIRGTAINQDGRTKGMTLPSVDAQEQLIKDAYRNAGLSMKDTRYVEAHGTGTQAGDKCETEALSRTFSPYRTASERLILGSVKTNIGHLEACAGLASMIKCVGILEAGVIPPNPLYKKGNPGIKFDDWKLHVPTSSIQWPTSGLRRISTQGFGYGGTNAHIIMDDAHNYLVSRDITAIHNTCLLNLTNGTTYIEHKEAPRPRIFHFSAQDKDGLGRVRDATCQYLKSGALEAGKMRQNEDKYLRDLAYTLSERRSRLQWQTFAVASSVEGLIETLQTKPWASPETRSASKVPRIGFIFTGQGAQWPRMGIELMEYDIFRKSVERSDVYLREGLDCSWSAIEELAKPDSSSNLGAAEYSQALCSVLQIALIDLLDSWNIRPSAVAGHSSGEIAAAYCLGVLSWEDALKVAYFRGSLSAEMKGNDSSLNGAMMAVGSSPADIEKWLDKVTAGEVVVACVNSPASITLSGDAAGINELESMLKEAGIFARKLKVDTAYHSPHMQTIAGQYFEAIADISILPVRNGCQMHSSVRGGYIDPNELGAANWVRNLVSTVQFADAVHDLLRPLVYGERAAHNAVDILVEVGPHSALQGPVNQTMKAHGINSINYCTMLSRGKNAINTALSCAATLYVEGLAVDLRRANQDESFAVEPIFDMPSYPWNHSIRYWAESRVEKEYRQRKYPRTPLLGAPCPSMNAGEKVWRGFIRPSEEPWVRDHVIQGSILYPAAGFLAMAIEAARQGTETGRSIDGFRLRDVQINAALVIEENVEPEVILRLQPHRMGTLDAGSVSWQEFTVSSSTDGTDLRQNCSGLLAIDYEPAEGSSMHIEKIKEVETIKGKLVKAKEQCRAAINVDEFYAHLDTVGLTYGETFANLTEVHTNAATGECTGRLLVPDVESAIPPHMRERPHIIHPTTLDAIFHLAFAAISEHPFSLKSAMVPISITEVVISNEVPHRKGSQLEGFAQSSRFGFRELVTNINIFDEQLTDAVVKISGFRCADVSGSSQSTSSGEAAKPITFKEIHRPALELLDYEDLQRAVNANADEIASGIFEQDTSLDKSALAIVKRTLSNVPRSSVHKDLLGFYDWMQRQVSSADKASGAGQRDSTGYTNISVKDLEGILSGEKIAAQAMDENVILMPALTSSANFQQIMKKLSQYLLILQHTYPELSVLEIIHSAENSTTGSILPQLQSAEVILDTSKYTVLVQNEKAAKTVESQLGTLTDLISLEVSATDNSVQDHGRQYDLALVVNIAHKDPDVLLCEAKSSLKEGGRVCIIEIGEPLLNLGIGLAALQHTHFIISSQNTDESHLNRAGFTKELLLGDALPPKNEFRLIAGNTSKRLAVTIQGEIVIVQAPEPSKSAQNVADALTEVLEKQCVRAIRVDWSLPEYISVIEGKECIVLADLEKSHLLEASQEEFPIIQQTILKAGGILWVSGSIGPDAALVTGLARTIRNEIPGSKLRVLQTNELSLASPTTWSNYILRLLQSPTLDSEFTIKDGFLQISRVVEYYTRNDALAVSLGRQEPKTVHMPLSETSSPVKLCIKNPGMLDSLYFEPDDILNSPLASGQVEIEVKASGVNFRDVMVCMGQIPDSLLGFEAAGIVRRVGENVQNIKAGDRVCFIAHGSHRTVHRVRNEYVVHIPDEMSFAEASGVLLVHGTAWYGLVKIAQIKAGQTILIHAAAGGVGQAAVMLAQHFGLEIFATVGSDDKRQLIQDLYKIPEDHIFNSRDLSFAKGVLRMTNGRGVDVILNSLSGETLRQTWHCVAPFGTFIEIGIKDILSNTRLDMRPFLQDARFAFFNLNRIENERPDLMSEALNESMAFISSGATRPVSPLMNFPVSQVEDAFRLMQTGKHRGKLSLTYSSSDVVPIQSRPTRSIRLDETSAYVLVGGLGGLGRSLAQLFVRLGCKKLCFLSRSGGASEKAQKLLKDLQQQGVKTLALRCDVSDAQSVKAAINECATRLGPVLGVVQCAMVLRDGLFEKMTHQQWVEGTRPKVQGSWNLHVNLPNVDFFIILSSFAGIFGSRGQSNYTAAGAYEDALANYRRSLGLKAVTVDLGIMRDVGVLAEQGITDYLREWEEPCGIREAEFHALMENVLTSEVLGDQEPLPAHIPTGFATAKTVQQFGITTPFYFDDPRFSILSAAGSSKTGAGDSTDSNKAISVQNQIAQSISISEAASAVTNALVARVAKSLQSALSDIDPSRPLHAFGVDSLVAVEVVNWVFKEIKAKVTVFDVLSSIPITSLAEKIALKSSLLPQLT

SEQ ID NO: 197 - protein, 1741 aa, Artificial Sequence
  PKSC2B
MSSKLRVANLLLYGDQTVEKLPAVRALVEHAQRSPAGRRFLRDACDIIQIEIFSLDTDERAHVGHFDTLLQLAESNAQADQPSEIVATILMNVTRLGEFILYAEEHPNVLGSIEQPTHIVAFCTGEIPAAVAAAARDSIELYNLSIETVRIICRFARNIIRRSVLVDRTNGSWATTIVGVSPGRVQTILDTFHQSQNIAPTRQINIGIMAAGWLTLFGPPITTEQLFNWSKELDGASRIKTDAGGGVHLPNLPELDLDEVVGLSPLLDVPITPKARLWSPYSCEIRNAATLRDLIRQVIPDITQYSLRLSDTIETAVKGLSNGSVKVVCVGYTAHLISLQKSLQRERREATVLQHSSAGSTFFTSPRGGSESIAIVGMSGRFPGSDNIQEYWQSLLDGERHIKEIPKNRFDLSKWYDETGKQKNATMNRSGAFLDRPGYFDNRLFNMSPREALQTDPLHRMFLTVSYEALEMAGYSPEATLATNSNRIATYFGQTSDDWRDIVLTQGVDIYYAPGICRAFAPGRLNYHFKWGGPSYSVDAACASSIATISLACSALLARECDTALAGGGSILDSPAPFAGLSRGGFLSPEKGCETFHDDADGYVRGEGVGVVVLKRLEDAVADNDNILGVIRGSARNYSKGASSITHPSSEAQQRLYRQVLNQNAIDAASVSYVEMHGTGTQAGDSTEMSSVLSTFGQSRSKDNPLVVGAVKANIGHGEAAAGVCALIKTLMMFQKHTIPPQPGMPFKLNHHFPDLEKMNVHIPATAIPLTSASNAAKRRIFLNSFDASGGNSCLLLEEAPLKHSKASDPRNHHVVTFSARTPFSLRAIKEKYLQYIRLNPNTSLADLAYTTTARRMHQSSARSTFTATSIEDFANKLETDLKKEDSPVKKSKGASSGPNVVFAFTGQGSQYAGMAHQLWHDSAVFRRLIDSIQSIATALDLPKFVDLIASQSFDLSKASPIQTQLAIVALEIGLAQLWASWGVQPSLVIGHSLGEYAALCISGVLTVSDTLYLVGKRAMMLVESVAQNEYAMLAINDEVDIIRQRLATDAYNTCEIACINAPKSTVVSGALSEIKIMQKELEEQGYRSTLLHVPFGFHSKQMDPILDSYESCVQGVGISSPRVPIASTLLGDIIQDKSTVSSVYLRRQTRESVNFVGALQAAQVSNFLRDDTLFLEMGPDPVCMSLVRSTLGTIATPRLLPALRRNENNWLTTSNTLAAVHQAGVPVNWPDYHREFTNCLTLLDLPTYVFDEKEFWTSYPDPEQLSGVEQKHLSPPPVPAVQGFPTTTLQRLTQEAFEDGKISVTFESSTSDPHLFEAIMGHAVAGVTICSSSIFSDMALSAARYTCERLQPGRWSEELLTISGLDIQRPIVVLDRKDSHIIQINAKLDAKTEEVYISFQDQVGKPIGSCKISFHDAASWKQNISRILYLVSFRIDVLKEATITGQGHRFLRPVIYRLFSNVVNYGERFQGLEEVFLDSECNDVVGQVRLPDLPSSKSGHFLYSPYLLDAVVHVAGFLVNCGLKYPEDIGFLASSFESWHILKPILPNKTYTSYSHMEESSNGSSLLGDVYVFDGKDLVGSLTGLRFQKMKKIALTRILQSAAPHSSMKIGAGVFRPDLLGSSEKQSSRNKQLARDVDFDTLPSSVEPSAFTTPKPSSSVTSIIGHDEPGVGDKFLAAVAAEVGCEISDLEPDTVFGDLGVDSLMAITVIASIRNDTGVELPGSFFLDNPTVAEATKALR

SEQ ID NO: 198 - protein, 382 aa, Artificial Sequence
  PKSC2C
MSSSASVETAWSQCLRIIAKETGFSIDDIDDEDEFTTDLGVNPIVARSIIRSFESVLKRDIPSTVFTQCPTIKEFRGGYFQSCIDSITEPKDDLAVKKAATAHGGNKKSTTNTTRTRARVPISIVLQGKPTMDCAEKTNIFLLPDGSGSGMAYVEMPLIDPSTVCLVALNSPYLNRASEYCCSIEEIAREYVQEIRKRQPHGPYVLGGWSAGGYYSYEVACELIRQGERVKKLILLDSPCRPDFEELPMEVVQYLSKKNLMGNWDRSARHTSVPSWVIEHFRSTLRAVREYVPVPMDAADAPDEVCIIWSREGVMPANQLRRTGLDLRVRVARFLLEGKPDLTSAYGWDRLFPGAHISISSISGNHFTLINKPNVSVCSFPE

SEQ ID NO: 199 - protein, 2392 aa, Artificial Sequence
  PKSC3A
MSSGDATTQDNHSVAITGLSCRFPGDGDDLGNFWDSICEGKSAWSKIPKERFNVDAFWSPSKNRNTSITKGAHFLKEEVSKFDANFFSLPKKEVEAMDPQQRIMVEVVYEALEKAGLPLEKIAGTRTGVFMGHFTSDYKEMVYRDPENAPSYSITGACKTSLANRISWLFDLKGPSFALDTACSSSLVALHLACQSLRSGESDIAIVGGTSLLLNPEMFMYLSNQAFLSPDGKCKSFDESANGYGRGEGFGCVVLKRIDDAVSTGDPIRAVIRGTGSNQDGHTKGFTLPSADAQAALIKETYQRAGLDLKSTGYVEAHGTGTQAGDVQETEALARTLAASHSAENKLIVGSVKSNIGHLEAAAGIAGIVKAVLILENGVIPPSINFQKGNPKIKFDEWKIKIPTALTPWPTDGLRRISNASFGYGGTNAHAILDDAYSYLKRRSISGNHYTKVSHATHPVNDVPKINGFHEHQGPRLFVLSAADKEGLQRVKSPLSDYVKEKAVKLEQNSGDATIFMRELAYTLSERRSHLQWKTYGIASSPDELSEVLKDKESLAFVSQSSRSPRIGFVFTGQGAQWPRMGAELMEYQTFRASVSAADTYLREECECPWSAAEELQKGKSTSQLHLAAYSQTLCTVLQVALVDLLKTWDVSPKAVVGHSSGEIAAAYCMGALTKEDAWKIAYYRGILSSEMKDVAPELDGSMMAVGLSPEKAEEWISKISHGEVVVACVNSPSSVTLSGDTPGIDELLALLKEEGIFARKLQVDTAYHSPHMQMVAQDYYEALADIEPLQASGECTMHSSVTGALIEASQLGAVNWVKNLTSPVQFSSAIYDMLRPMKKSKRADNNAVDLLLEIGPHSALQGPATQTLKAHGIINIPYQSVITRNQSGVQTAMSLVGALFTQGVPVNISQVNNDGSTHITTPKPLVDLPKYPWKHSQRYWHESRIEAEYLSRETPKLSLLGAPSPSVGDRERLWRGFVRLSEEPWIADHKILGEVLYPGAGYLAMALESAYQTADKNKKIAAYKLKEVQFTSAAIISEGNDLECIVQLRPHIIGTRDSSSTWTEFVVTSSADGKTLRKNCSGLLIIEYEPAEGSDMKRERDLELQVSKNQYLEAKRSCTNALTPTEFYTDLASMGLIYGPSFANLTAINNRDGQSVCSVQIPDVQARTLEGSDRPHIIHPGTLDAIFHLAFAAIKGGKANVSSAMVPRFIDEVIISAKVPFKPGTNLPGFSNSAKHGFKELKADIVIFDENENLPIVEIAGFLCMEISGGSLGNAAETKPKAISSKLSWRPAIDLLSVEEQRIALEKSTNLNKLAEYLRLLHHSNAALSILEVDLESEHSSPTVLCPTLDGFKGILRTGEYIIACQDDARKSKFQEDPSLDPNITVEVLDIEKELSSEILKDQSYDVIVVSNLDAIAGKIAVIENMIKLLKEGGKICVVQANNEFEEVKRLLRNKGIKTMVFPGLEDSRLQQHGLIIGSQGGITQTSGGGIEVTIIEAAKPSKAAQIVATELAYVLEKLDYKTHRFTWGSDVTRLKNKSCISLVELDTSLLRDLTEPDFVSIKNLILDTANTFWAVGFDDPSAFMINGLARVVRNETPGMLFRTLHATKNSEHLGQLIGWAFHSKTADDEFLVQDGLLQVSRIEEDAALNQEINDLLPGTQLKILSIPLNQAQYPLKLCVQTPGMLDSLCFEADDLPETELEDEKIEIEVKATALNFREVMVAMGQISGAKLGLDASGIVRRVGASVTKFKVGDRVAMYGHGSHRTVHRSRADYCALIPDGLSFEQAATIPTVHGTAWNALVRLARVQKGQSILVHAAAGGVGQAAIQIAKHFEMEIFATVSSGAKRKLIRDEYGILDDHIFNSRDLSYVKGIKRMTKGRGVDVVLNSLSGEALRQTWHCIAPFGYFLEIGIKDILNNTGLDMKPFLQDATFSFFNLTHIENSRPDIMAAIIEGAFDFQRRGITRPISPLVTYPISEMESAFRLMQTGKHLGKIALTWSEEHVIPVIQRESNSPKINPDGAYILAGGLGGLGRSLSMKLVGLGARKLCFLSRSGSDSVQAKGLVRDLEGQQVQVRVYKCDIADEKAVATVVKRCQSDLGDIRGVFQCAMVLRDTLFMNMTYEQWIESTRPKVQGSWNLHQNLPNVDFFITLSSFSAIFGNRGQSNYAAAGAYEDALAHYRRAHGQHATTLDLGIMRDIGVLAETGITESLREWEKPYGIREIEFLALMERAIAGDITGTISPQVLTGLATAGSAFAAGITPPFYLDNARFSIMARTDIRGQTSATAGDSVSAQMLISQAKSFEEAADYVLTALVKHVAKMLQASASEIDTSRFLHSYGIDSLVAIEIVNWALKEIKSNITVFDVLAGVPMTTTANKIAEKSGALPKELVRV

SEQ ID NO: 200 - protein, 2359 aa, Artificial Sequence
  PKSC3B
MSSFHVNRLLVIYTSSDEECVLFGDQTVEKLSSIQALVRHSKTSAGARRFLREATDLLQINFSTLSKEERGWSHEIHTLLGLAEDNIAEEKPNGIIATVLMCIGRLGELIMYAEEDHSILGSKESPVHALAFCTGLLPAAALVAARDTSELFDIGKEIISITFRMAYEIIRRMKLIEDTNRSWATTIVGATVEKTQPILDEFHRTQKIPHPKRVAIGVLSTGWLTLMGAPSSLARLMEWSKELDEAPKIQTDTNGAVHTEYMPRFDLDQVLGDSPLLKIPITSKARMISPSSCKPYSHTTLRDLLAEILIDIAHNILHISGTAEECISGLVGKRPVSLTVAGPTGHLTAVQRVLQKKGIEYNIREHDSPKTDSISRGGSDLVAIIGMAGRFPGSETIDGFFEDLLAGKGQIKKIPKSRFDLDVYYDPTGKKRNTTSAQHGAFLDNPGHFDNRLFNISPREAAQIDPLQRLLFTTSYEALEMAGYSKDATLATESNRIATYFGQASEDWRDILNNEEIDIYYVPGLSRPFGPSRLSYHHKWGGGTYALDAACATSTTAISLACSALNARECDTALAGGGSILVSPKTFSGLSRSGMISNNGGCRTYHDDADGYVRGEGIGVVVLKRLEDAIADNDNILGVIRGSARTYTSTSTSITHPSAESQARIYEEVLRQTSVVPNEIAYVEMHGTGTQAGDLEEITSVIKVMGRGRSKNNVLTVGAVKANVGHGEGAAGVTSLIKVLMMMRERKIPTQPDIPFKLNHNFPNLERLNVKIAGFSGKDMTLKPSPAAADGKIKVIVNSFDASGGNTSLVVEEPPNPPSKLENPLPCHVVAISGRTITSLQENRRRLLDYLTRNPSTKLADIAYTTTARRMHEVLRVAYTARSTREITNHLRADISKEKSTDPKSKPPSMTVVFAFTGQGSQYAGMGRQLYQHSSAFRDILHTYQMMAEHQGLPHFLHIISDEKVDITAIPAACVQLAIVVLEIATAQLLKIWGVKPDLVMGHSLGEYSAMCVAGVLSISDTLFLVGQRAQLMEQQLVAGEYSMLAIGKDHQSVLQLLKSGSENGWNNTAIACINAPQLVVVSGPIGEIEILKAKVEEGGSRATVLKVPYGFHSHHIQPILGKFENIVSGVTFSAPTIPIASTLLGKIVEAGQGDVFSPSYLIRQARECVNFVGALDICKDDGFANDRTLWIEIGPEPVCVGLIRRTLDVPSPHLLPIMKSSEDNWVTLSSALATLYKSGASINWPQYYKEFQNSLSLLALPTYAFDEKNYWTPYVEHAAAPAGSPHTTEMKSGPSPTVVPSLSTHDLQWVEEEKMDGKSITASFASQTSEPHLYKAIRGHVVNGLTICSLSIFCGMAKSAANYAYSKLHQGKMIPNMSLFNVDMTHALVVPELNPEQIVKTTVSYSSTGNRANITFHSTNAGIATQHGTCQVVFEDSSAWFSQLSQTLFLVNTRVESLKEMATRGKSHRLLKPVIYKLFENLVAYDNKYQGLEEVWLDADCRDAVGTVKLPNTVGSGNFLYNPFWTDAAIHLAGFLLNGSLKYPEDIACLSTGFESWRVLEELQADGIYTTYVSMQETETPSVLSGTAYVYNHDKLVQVTTGIKFQKMKKLILNSILHPIAPASTGNKKAVVKLQNRFETPKQPEVSARGYETPSSQEDSDSSSEKGGLNGTSTPTSSLSDNVGLNLVEAFLSVVATESGYNVADMESATAFADMGMDSLMSITILASLKRDTGVELPATFLLDNPTVGDAKAALIEEADSEESIADSTPLAPNSVEAPNIPKVFEAQEPLEKVFRQEEQEEEQAPSFQSTIVAIVEATNPGRLSKAMLLQGTPSSAGPKLFLFPDGSGSPSRYIQLPTLGTDINVYGLESPFVKTPNEYICSIGELCDMFIAALKKEQPTGPYVLGGFSLGSIYAYEVARKLLENNEQVNGLLIIDMAIPKMLNVGLKPTLEEVKAAGLIPATGRISTAQKEHLLSTIMAMTKYHPTPCTSDRRPKKTVLISSKAGLGVGMQSELAQWAQGSASETRGWEEMVGPVEVHEIEAEHFFLFKLPAVKGLGELYHMYFRILSEPNHCIMSGKISKPEDASVFGPDSSRWKFPFWFVNYYQIIFFSDGILNMGDDSTHFIDLQILLLIQENSCNASPQLIHHREPNMASKLPSDVTSKDVARAPPGIKDNDRRKIWTPVAKDWATFEKYGRETNGEYTLLTVSVAPGGENAAHWQGSYSETFTADIGQVGIYSKSTGKMMLSPGESVTVTPGEVHYFFNPGNEDVEMKIKLHPAREGFEKGLYILYGLARDGKSSNGGIPNNFMYSAIIFTMSDMWPSGLGGMILTPIMKILARVGRLCGVEEQLVKRYWD

SEQ ID NO: 201 - protein, 358 aa, Artificial Sequence
  PKSC3C
MSSATTKPSDTEIIFGIIAQEVGVTRDELEGETEFADLGVDNLLAKSILAQILDETKVRLPATTFDDHPTASSLHSYLQESVKHSTADTPKKIASTGSPASANPLSIILQGKPLSSNKKIFLLPDGSGSGMAYLRLPIIDPSVCLIGMNSPFVQSSGGESFTVEGIAEGWVKEIRLRQPEGPYILGGWSAGGYYAFEVAKILVRAGQKVEKLILIDSPCRLVFEELPMEVVHYLSTNNLMGNWGSKKPPSWLVEHFEMSIRAISEYTPTPMDPEGLPEVFIIWAEDGVLKNVDPISTGLDFNVKVTRFLIQERDGVKPHGWERLFPGAKLSIATMPGNHFTIVYPPEGYVATERTTDQ

SEQ ID NO: 202 - protein, 2417 aa, Artificial Sequence
  PKSC4A
MSSGSLVPTRDDVAIIGMSCRFPSDADTADRFWDFICQGRNAYAENPSRWAANAFHHGEKKINTSLTRGGHFIKQDVAAFDANFFSLSKTEAESMDPQQRMIMEVTYESMESAGLRIENLAGSRTGVFMASFTSDYRELMFRDAETAPLYTATGTSNTSTSNRVSWFFDLRGPSFTVNTACSSSLVACHLACQSLWSGETETAIVGGTSLLLNPDMFLYLSNQQFLAPDGQCKSFDNAGDGYGRGDGIGVVILKRVADAIRDGDPIRAVIRGSGSNQDGHTKGFTIPSVEAQASLIAETYRNAGLSLAETRYVEAHGTGTQAGDTREMEGIAQTFSKHRAESDELLVGSVKSNIGHLEACAGLASLIKCVYILETGVIPPTPSVRLLNTKIPWAEWHLKVPSTRTPWPKTGLRRLSTQGFGYGGTNAHLILDDAAHYLEERNLRGHHYTSTEIPHAQRLLDDSPQNKKRQMLFLFRSNDREGLRRVRSSLEQHLRNRLASVPQDGGDYLQDLAFTLANRRSLLKWQTFAAASTAEELVDLLKKDDNSWTAPVARCTTEPPRIGFIFTGQGAQWARMGVELMEYAIFRKSVEESDLFLRQTLHCPWSAAEELAKSQDTSRLSEAAYSQTLCTVLQIAIVDLFEDWNVAPTRVAGHSSGEIAAAYCLGALSKHDSLRVAYYRGVLSSEMRQTHKDQKGAMMAIGSGPERVEEWLKQLTKGRVVVACINSPKSVTASGDAAAIDELTTIVEGAGVFGRKLQVDVAYHSHHMQTVASAYADLLKNVKPLPAREGRSMHSSVLGRAIDATSLGASNWVSNLVSPVRFSDAISDMLYDGEDLALDFLVEIGPHPALKGPVQQILQPHGPSALAVKYASVLTRGHGAVKTALACVGECVLSNVPVDVARVNGGIGNPRPVVDLPPYPWNRSTRFWAESRLSEEYRLRKHARLPLLGCPCPTMGARERYWRGMVRLDEEPWIRDHEIQGSILYPGAGFLIMAIEAALQQADNLRTVASFTLRDVHLDAALVVTEDSIVEAILQLRPHLLAPGSSQSSWMEFTVNSSTDRGPLRQNCSGLIMVEYEVDADSDMGRESALESAAVVDFYKETQLSCRKTVDVDKFYSRLDSLGLSYGPTFANVTAIRRSGEGKCVGSLRVPEVDSAVPPAYSSHPHVIHPTTLDAVFHLAFAALEDALLPGPMVPTNIDEVVVAANVPNRPGTLLRGVSQSSPHGFRELVSDISMLDDEMSRMVVRIKGFRCADVSGGNMTSLEAVETRPIGFRLEWKPAVELLPDEKLKQFIGDVAEKRTDSKLARAGELKNEARHISEELGQTENLPTPDQQDQWLKEMEDCGVLFELAQALDTTAQFAISVCQESAVDRIKGWFGSKASAIDVVVADYSTKLDKSSEMHDVIIVFDPGFVYAKQDVVLRNARKLLNPGGTLVIAEINKPEANLTTALRALQWTRNIDSTKSIWASSFSRLGLTPSLDLIDSTASGYGRSTLRLTANVSPSGLSSDGQAKLEHVSIVVSAAASSRAQRVASAIATRLEESCTVHIVRWGPDASKLKGQTCIILTDLESALLKDLASEDLTNLQTLLSLAESTLWVSGPLGPDAALITGLVRSVRNEAVGVQLRTVEMTDVPLSEAEEYADAVSRIFHYRGSDDEFQARQGTLQISRLVEDEERNMELAQLLGQGEKAAVATTLQEKPEALKLCVRQIGMLDSICFEPDPLSREPLGAEEVEIDVKASGINFRDVMVALGQIPDRAFGFEGAGVVRRVHESEKRLRPGDRVAFLAHGAHRTVHRVRSGFAMPLPDTMSYEEGAAILLVHTTAWYALVKTARATPGQSVLIHAAAGGVGQAVLMLARHLSLEVFATVSSEEKRKLVHEAYGVPHDHIFNSRDVSFALGVKRMTRDRGVDIVVNSLAGEALRKTWHCLAPFGTFVELGMKDILDNARLDMRPFLQDATFVFFNLNRVQKERPELLQEALTETMALVRSGALKPAVPLTAYPASDVEKAFRKIQTGQHLGKLVLTFQAGDTVPVVRPDLSLSDSGTYLLVGGLGGLGRSLARLLVRLGARRLCFLSRSGAKSSEAQALVEELASQHRVQVLVSEGDVSDAAVVSRTVEQCNTKLGPIRGVFQCAMVLRDGLFASMTHAQWTESTRPKVQGTWNLHAQIPNADFFITLSSFAGVFGSRGQANYAAAGAYEDALAHHRDAGGQRAITLDLGIMRDVGVLAETGITDYLREWEAPFGIREPEFHALIKSAILATTQPLKEGTSSQIPTGLATARSAQAAGIAMPFYFEDSRFSILAQTRASSAGASAAGDTDSKLSVRVQLAQAQTIAEAAAAVQAVLVERVARTLQSNASEIDPSRPLHSYGVDSLVAVETVKWMFKTLDAKMTVFDILSNVSISVLCEKIASASALVKLG

SEQ ID NO: 203 - protein, 1749 aa, Artificial Sequence
  PKSC4B
MSSKSHVTNFLFFGDQTVEKLPAIRQLVRLAPSSRLVQRFLRQACDAVQVEVGQLPTHADQRSNIGNFDSILRLAEDNDQRGAPSEIVATVLMNIARIGELILYAEDDPSILSRKGNRSCILGFCTGELPAAIAAVAQDTTELVDLGVEATRIIFRMARELNHRSLMVDRTNGPWARTLLNISADRVGAILKEFHESQAIPRARQVCIGFVSEGWLTLFGPPTTLERLFDWSVELEDAPHIDTDARGGVHMETLPEVDVGRILGSSSWLERSLDPATTIISPYTCQPRQHRKLRALLEEIILDVGQRTLYLAAAMNAALELTKTEKLRVVMPGYTSHDVYLKKLLQKRGVEYTVASHSDRPALTTGREGSGLVAVVGMSGRFPGSGNINEFWEGLLQGKRYVQEVRRCSRHIATIHLCGDPRLTRHWQIPPSRFNLDEWYDTTGKEKNSTMARTGAFLDQPGLFDNRLFNMSPREAMQTDVQHRLLLTTSYEALEMAGYYPDGTPSTNRERIASFFGQTSDDWREVVVHQGVDIYFATGSCRAFGPGRLHHHFKWGGPSYSVDSACASSVAAVGLACSALLGRECDMALAGGGSLLLSPSPFSGLSRGGFLSTHGGCQTFQDDADGYVRGEGIGVVVLKRLEDALEDQDNILGIVRGSGRNYSSDASSMMHPSAASQQKLYRSVLEQSGVEANSISYVEMHGTGTQAGDFMEMSSVLSIFAEKRASDNPLIVGALKASIGHGEAAAGVCGLIKTLMMLQSRQVPPQPSLPGPINHRFPDLASKNVYIASRDMSLKASPSAKGTIRVFLNSFDASGGNSCLLLEEAPPRVEKPADPRSHHVVTLSGRSQKSLLGAMERYLAHLRENPGIQLADLAFSTSARRIHGLLRYAITASSVEQVIHCLEADLAEKKTPRQPPVTSTVIFVFTGQGSHYPSMGSHLWETSATFRAKLHDFQAVATAQGLPYFLDLISRSTTAEPRSDPDTVQIQLAILSLELALAALWRSWGIEPSLVLGHSLGEYAALCVAGVLTVGDALYLVGTRARIMAGTLTVDEYGMLAVNMGCDDVRSLLATGQHTSCAVACINASKMTVVSGPQSKLEKLQMQLKSDGIRCTPLSVPYGFHSPQLDPILAQFEEACHGVVFSTPQVPIVSTLLATVIRKEGTFSAEYLARQAREPVDFVGALAVVDEQKYAFKVFLEIGPDPICLGLVKATLGIKEAKLSLLASMHRDKDNWSSISCSLRDLYMAGASVDWPAFHRDFKSSVSLIDLPTYSFDEKVFWSSFPGREPQPAKDLEARRRSDSGIAPSVQGFGTTTLQRVLKETVLADGCSVTFESDLADSHLRAAVQGHSVADVQICSSSLLLDMALSAAQYAYRKHMAGRAMPSELVVRNCYFHRALVLGEKDQRLQVTATLSSSETLVEIEYHCLTADENFELGACQVILEPAARPPQAAFLVRSRIAALKASAGHQLGRLAVYRLFDSVVRYSEEYKGLEKVYLAEEMQDAVGQISMADVPAAGGHYLHHPFLLDSVVHLAGFLVNNGMRYSSDWACLSTGFDEWHQFKALDPSVVYTSYTFMEDSASTNNVVAGDVYVFDGDELVSVLTGLQFQKMKRTALHHLLSPSSAPSTGRSIASRAAPVASGATPAASNSALPTRTVADYEAPTPPTTVDDSEAEGAKVDLVNALFSIVAREVGVEMSDLHGDVNLANLGIDSLMAITIISVMQQETGVELAGTFFLDNSTTTEVIAALRGA

SEQ ID NO: 204 - protein, 378 aa, Artificial Sequence
  PKSC4C
MSSAVTMWQGALKIIAQESGLEPGEIIETEDTEFTALGINRILATAILSHLRGPRGEALPHDIFDQKPTVGAFRRFYESPIVLNVTPGHGVGHTPSTRAKQSRAASSIPLSIVLQNTIASSCHTVFLLPDGSGSAMAYANLPPVHPSVCVVGMNSPYLRNTGAYRCSLEELASQWVSEIYRRQPHGPYILGGWSAGGYYSYEVAKRLLRDGNVVEKLILIDSPCRTVFESLSMEVVQYLSSRNLMGNWGTQSPPDWLIEHFRSTLTAVGNYRPLPLGSAGGMETYIIWSRDGVLDDKTLANSGMDTTVKVSRFLLQGKDDLGPNGWEHLLPTKNMAIATQSGTHFTMVNDPHVRICLTKSPRTRLTNDTGGTDERVAA

SEQ ID NO: 205 - protein, 2517 aa, Artificial Sequence
  PKSC5A
MSSQAPAPSRDDIAVVGLSCRFPGEADTAEHFWDFICNGRNAYSENPDRWTPDAFHYGEKKINTSLPRGGHFMKQDVAAFDANFFNLSKVEAESMDPQQRIIMEVTYESMESAGLRVDELAGSRTGVFMASFTSDYREMLYRDAETAPLYTATGTSNTSTSNRVSWFFDLRGPSFTVNTACSSSLVACHLACQSLWSGETESAIVGGTSLLLNPDMFLYLSNQQFLAPDGQCKSFDESGDGYARGDGIGVVILKRVADALRDGDPIRAVIRGSGCNQDGHTKGFTIPSVEAQASLIAETYRNAGLSLAETRYVEAHGTGTQAGDTREMEGIARTFSQHRTASDELLVGSVKANIGHLEACAGLASLIKCVYILETGVIPPTPSVRVLNPKIRWEEWHLKVPATQTIWPTEGLRRLSTQGFGYGGTNAHLILDDAAHYLEARKLRGHHYTRTHPQTRRLLTSAMHEAVPNDQPPRLFLFRANDREGLGRVRSSLAQHLEQLLKSWPQDSRDGGAYLHNLAFTLASRRSHLQWQTYATASTPSELLQALQQEGGAWAAPETRVAASAPRLGFIFTGQGAQWARMGVELMAYPVFRQSVEASDEFLRSALGCPWSAVDELAKPQATSRLSEAAYSQTLCTVLQIATVDLLEDWNVCPARVAGHSSGEIAAAYCLGALTKHDSLRVAYYRGILSSEMQQTHGDRRGAMMAVGASPEEVEAWLAKLTRGRVVVACINSPTSVTASGDAAGIDELLAMVQEAGVFGRKLQVDVAYHSHHMQSVSSAYAELLKDLAPLPARPGRTMHSSVLGRVIDAAELGASNWVQNLVSPVRFSEAVSSLLSDGDKPAVDVLVEIGPHAALKGPVQQILQAQGVSALKYTSVLSRGQSAVKTALACAGELVLSSVPVAMSRVNLESGPQPSPLVDLPPYPWNRSTRFWAESRLSREYRLRKHARLPLLGSPCPTMGARERYWRGMVRLEEEPWIRDHEIQGSILYPGAGFLIMAIEAASQHAGEQRKVSAFRLRDVHLDAALVVTEDSTAEAILQLRPHLLAPGSSQSSWMEFTVNSSIDGGDLRQNCSGLIMIEYAADADSAMDRERALESDMVCDWYKKTYVSCQQSVDVGKFYSRLASLGLVYGPTFANVTEIRRTGQGQCIGAVRIPAVDSLVPPAYRSHPHVIHPGTLDAVFHLAFAALEDSLLPGPMVPTTIDELVVAADTPNTPGTLLRGVSRSSPHGFRELISDIDMLDDQNSRALVQIKGFRCADVSGGRMTESEAASAESRPIGFRLEWKPAIDLLTGEQLRTYLDHCVKQEGASNVARATELNNHVHHLEETLPRVAVDPAMANLSDWLSAKSAKLTNGAASSSKRPSPGGDMLAMRDALTAVREGSIPSPEQQDKMLREVEQNGALSILLKSLDAYIDLRHHAKPDLSILELSLDSVPYSVFAALPSRHKILQTAQYAIRVSQEGVADRVRAQFGSQASDIEVSAADFTKKLDEALGKHDVILIFDPGFIHAKLEVVLRNARKLLNPGGRIIVAEVGEPGLYLGTALGCLQWTRNLDVAQSSSSWTSCLARSGLTPALKLIDMDTESAVHGHFRLSLTGNAAESANSDNRQPQQVTLIESANASATAQAIAAAVAQNLEKASIPTKRVRWGSDVSQLKGQPCIVLTDLESALLKDPAPEDLAALQSLFSNAESTLWVSGPLGPDAALITGLSRSVCNEAADVHIRTLEVTDLPGPGADSYADLVTRVFRYSGPDTEFRWHSDALLVSRLVEDEARNKEIAQLLGQGEKAAVATTLQEKPEGLKLCMRQIGMLDSVCFEPDLLALEPLEAGEVEVDVKASGVNFRDVMVALGQIPDRAFGFEGAGVVRRVHASETRLRPGDRVVFLAHGAHRTVHRVRADYAMPMPDTMSFEEGAAILLVHTTAWYALVKSARATAGQSVLVHAAAGGVGQAVLMLARHLGLQVFATVGSEEKRKLVHETYGVPHDHIFNSRDASFAMGVKRMTKGRGVDIVVNSLAGEALRQTWHCLAPFGTFVELGMKDILDNARLDMKPFLQDATFVFFNLNRVQKERPDLMGEALRETMALVRSGALKPATPLTSYPASQVEAAFRKIQTGQHLGKLVLTFQAGDVVPVVRPDLSLSDSGTYLLVGGLGGLGRSLARLLVQLGARRLCFFSRSGAASSEARALVKELEMQHRVRVLVCKGDVSDADTVSRVVQQCRAALGPIRGVIQCAMVLRDGLFERMAHDQWTESTRPKVQGTWNLHEQIPVSDFFITLSSFAGVFGSRGQSNYAAAGAYEDAMAHHRQSLGQRAITIDLGIMRDVGVLAENGITDYLREWEEPFGIREPEFHALIKSAIMSTTQPLTERSVVQIPTGLATARSAQAAGISTPFYFDDARFSILAQTRTSAGASSAAGSGDADAGKVSVRTQLSQAHSVAEAAAAVQTVLLERVARTLQSSVAEIDPSRPLHSYGVDSLVAVETVKWMFKTLDAKLTVFDVLSNVSITALCEKIASMSTLVKLN

SEQ ID NO: 206 - protein, 1717 aa, Artificial Sequence
  PKSC5B
MSSKLRVANFLLFGDQTVEKLPAIRHLVSHGSSSPLVQRFLREVCDAVQLQVSKLPQHSEQRSNIGNFDSILRLAENNARLEEPNEIIATVLMNIARLGELILYAEQDPTVLASKGNRNCILGFCTGEVAAAVAAVAQDTNELVELGVEVTHIIFRMARELNRRSLMVDRTNGPWARTILGISVDRVREILQDFHENQSIPRARQVCIGFVSDGWLTLFGPPTTLQRLLEWSAELEDAPQIDTDARGGVHMETLPEVDPDRILGSSPWLDRAPVHTATIISPYTCKPRQQKTLRGLLEEIIADVGQRTLNLATSMNAALELAQADKIRLVMPGYTSHDVYFQKLLQKRGIEYSVMSHGDHLSSGPSRQGSGLVAVVGMSGRFPGSGDINAFWEGLLEGKRYIQEIPNTRFDLEQWYDATGKQKNSTLARTGAFLDKPGMFDNRLFDMSPREAMQTDVQHRLLMTTSYEALEMSGYYPDGTLSTNKDRVASFFGQTSDDWREVVVHQGVDIYFATGSCRAFGPGRLHHHFKWGGPSYSVDSACSSSIAAVGLACSALLGRECDMAVAGGGSLLLSPSPFSGLSRGGFLSAHGGCQTFHDNADGYVRGEGVGVVVLKRLEDALDDQDNILGVVRGSGRNYSSDASSMMHPSANAQKKLYCDVLEQSGVDANSISYVEMHGTGTQAGDFMEMSSVLSTFAEKRGSDNPLIVGALKANIGHGEAAAGVCALIKTLMMLQSRQIPPQPDLPGPINHRFPDLAARNVYIAARNMRLEASPVAKGTLRVFLNSFDASGGNSCLLLEEAPPRAVKDADPRGHHVVTLSARSQKSLIGIKERYLAHLRQHPGTKLADLAYSTSARRIHGLLRYAIAASSIDEVVQCLETDLAQGKTPRQPPATPTVVFTFTGQGAHYVGMGANLWETSATFRNTLHDYQTMASAQGLPQFLHLITDSSTPAPQSGPDTVQVQLAMVSLELALAKLWRSWGIQPAMVLGHSLGEYAALCVAGVLSVSDTLYLVAKRAQIMAGALTPHEYGMLAVNLSVADTREVLSSGEHTSCAVACINAPKMTVVSGLRSKLDDLQDQLKSDGTRCTPLSVPYGFHSSQLDPILGQFEEACQGVTFSAPNVPVVSTLLATTVREEGTFSPEYLARQAREPVDFVGALGAVQEHKLPSLTFLEIGPDPVCSGLVNATLGADEAASRCVASMHRGKANWASISCSLRDLYTAGAAIDWPAHHRDFKSSVSLLDLPKYSFDEKEFWASFPDRDLQTIGEVQTKHSQPPAIVPSVQGYCTTTLQRITRETIEPDGLSVTFSSDLADQHLRAAVRGHAVADVEICSSSLLLDMALSAAQYAYMKHSPGQKMPVPLTVRNCYFHRGVVLTDKAQTVEVTVTLTSSAKTADIRYHCRTPDEYYEVGACQVVLKPASKPDQAGFLVRSRMAALKASASHRLGRRAVYRLFDNVVRYSEQYQGLDSVHLSEDMQDAVAEINMAHVPAAGGHYLHHPFLLDSIVHLSGFLVNNGLRYSSEWACLSTGFDEWHLLKPLDPTTVYTSYTFMEDSRSTSNLVTGDVYVYDGEELVSVLTGLQFQKMKRTALTHLLSPPTVGSMAAKPSTCMPTKAQTELLPAQARVVGSPVPTPPATASVDDGEGEKFDLVNTLFSIIAREVGVEPSDLEGDVNLANLGIDSLMAITIISVMQQETGVELPGTFFLDNATTTAVIAAVG

SEQ ID NO: 207 - protein, 377 aa, Artificial Sequence
  PKSC5C
MSSAVTVWQDALNIIAQESGLEPAEIIETEDTAFLTLGINQILATAILAHLRGPRGEPLPRDIFDQKPTVGAFRRFYETPIHLDIAPVAAPAPPKLKRVPSSSVPLSIVLQNNPASSRHTVFLLPDGSGSAMAYANLPPVHPAVCIVGMNSPYLRDAGSYRCSVEDLASQWVREVYRRQPRGPYIVGGWSAGGYYSYEVAKRLLQDGHAVAKLILIDSPCRTVFESLSMDVVNYLSSRNLMGNWGSPEMPEWLVQHFRSTLAAVGKYRPRPIGSAGKMQTYIIWSRDGVLDHDALARSGLDTSVKVSRFLLQGKDDLGPNGWDDLLPSKDMAIATQSGTHFTMINKPHVAQMSDLLRDAVIGIGSDRQSHWQRVSES

SEQ ID NO: 208 - protein, 2517 aa, Artificial Sequence
  PKSC6A
MSSQAPAPSRDDIAVVGLSCRFPGEADTAEHFWDFICNGRNAYSENPDRWTPDAFHYGEKKINTSLPRGGHFMKQDVAAFDANFFNLSKVEAESMDPQQRIIMEVTYESMESAGLRVDQLAGSRTGVFMASFTSDYREMLYRDAETAPLYTATGTSNTSTSNRVSWFFDLRGPSFTVNTACSSSLVACHLACQSLWSGETESAIVGGTSLLLNPDMFLYLSNQQFLAPDGQCKSFDESGDGYARGDGIGVVILKRVADAIRDGDPIRAVIRGSGCNQDGHTKGFTIPSVEAQASLIAETYRNAGLSLAETRYVEAHGTGTQAGDTREMEGIARTFSQHRTASDELLVGSVKANIGHLEACAGLASLIKCVYILETGVIPPTPSVRVLNPKIRWEEWHLKVPVTQTIWPTEGLRRLSTQGFGYGGTNAHLILDDAAHYLEARKLRGHHYTRTHPQTRRLLTSAMHEAVSNEQPPRLFLFRANDREGLGRVRSSLAQHLEQLLKSWPQDSRDGGAYLHNLAFTLASRRSHLQWQTYATASTPEELLQVLQAEGNAWAAPETRLAASPPRLGFIFTGQGAQWARMGVELMAYPVFRQSVEESDGFLRSALGCPWSAVDELAKPQATSRLSEAAYSQTLCTVLQIATVDLLEDWNVCPTRVAGHSSGEIAAAYCLGALTKHDSLRVAYYRGILSSEMQQTHGDRKGAMMAIGASPEEVEAWLAKLTRGRVVVACINSPTSVTASGDAAGIDELLAMVQQAGVFGRKLQVDVAYHSHHMQSVSSAYSELLKDLAPLPARPGRTMHSSVLGGVIDAAELGASNWVQNLVSPVRFSEAVSSLLSAGDKPAVDVLVEIGPHAALKGPVQQILQAQGVSAVKYTSVLSRGQSAVKTALACAGELVLSSVPVAMSRVNFESGPQPSPLVDLPPYPWNRSTRFWAESRLSREYRLRKHARLPLLGSPCPTMGARERYWRGMVRLEEEPWIRDHEIQGSILYPGAGFLIMAIEAASQQAGEQRKVSAFRLRDVHLDAALVVTEDSTAEAILQLRPHLLAPGSSQSSWMEFTVNSSIDGGDLRQNCSGLIKIEYAADADSPMDRERALESDMVCDWYKKTYVSCQQSVDVGKFYSRLASLGLVYGPTFANVTEIRRTGQGQCIGAVRIPAVDSLVPPAYRSHPHVIHPGTLDAVFHLAFAALEDSLLPGPMVPTTIDELVVAADTPNSPGTLLRGVSRSSPHGFRELISDIDMLDDQSSRALVQIKGFRCADVSGGRMTSSEAASAESRPIGFRLEWKPAIDLLTGEQLRTCLDRRVKQEGASNVAHATELNNHVHHLEETLPLVVVDPAMASFSDWLSAKSAKLTNGVASPSKRPSPGGDMLAMRDALTAVRAGSIPSPEQQDRMLREVEKNGALSILFKTLDAYIDLRHHAKPNLSILELSLDSVPYSVFAALPSRHNILQTAQYAIRVSQEGVADRVKAQFGSQASDIDVSVTDFTKKLDEGLGKHDVILIFDPGFVHAKLEIVLRNARKLLNPGGRIIVAEVSEPGLYLGTALGCLQWTRNLDVAQSSSSWTSCLARSGLTPALKLIDMDTESAVHGHFRLSLTGNAAESTNSDDGQPQQVTLIESANPSATAQGIAAAVAQNLEKASIPTKRVRWGSDVSQLKGQPCIVLTDLESALLKDPAPEDLAALQSLFSHAESTLWVSGPLGPDAALITGLSRSVCNEAAGVQIRTLEVTDLPGPGADSYADLVTRVFRYRGPDTEFRWHSDALLVSRLVEDEARNKEIAQLLGQGEKAAVATTLQEKPEGLKLCMRQIGMLDSVCFEPDLLALEPLEAGEVEVDVKASGVNFRDVMVALGQIPDRAFGFEGAGVVRRVHASETRLRPGDRVVFLAHGAHRTVHRVRADYAMPMPDTMSFEEGAAILLVHTTAWYALVKSARATAGQSVLVHAAAGGVGQAVLMLARHLGLQVFATVGSEEKRKLVHETYGVPHDHIFNSRDASFAMGVKRMTKGRGVDIVVNSLAGEALRQTWHCLAPFGTFVELGMKDILDNARLDMKPFLQDATFVFFNLNRVQKERPDLMGEALRETMALVRSGALKPATPLTSYPASQVEAAFRKIQTGQHLGKLVLTFQEGDVVPVVRPDLSLSDSGVYLLVGGLGGLGRSLARLLVQLGARRLCFLSRSGATSSEARALVKELELQHRVRVLVCKGDVSDADTVSRVVQQCRAALGPIRGVIQCAMVLRDGLFERMAHDQWTESTRPKVQGTWNLHEQIPVSDFFITLSSFAGVFGSRGQSNYAAAGAYEDAMAHYRESLGQRAITIDLGIMRDVGVLAENGITDYLREWEEPFGIREPEFHALIKSAIMSTTQPLTERSVVQIPTGLATARSAQAAGISTPFYFDDARFSILAQTRTSTGASSAAGPGDADAGKVSVRTQLSQAHSVAEAAAAVQTVLLERVARTLQSSVAEIDPSRPLHSYGVDSLVAVETVKWMFKTLDAKMTVFDVLSNMSITALCEKIASMSTLVKLN

SEQ ID NO: 209 - protein, 1717 aa, Artificial Sequence
  PKSC6B
MSSKLRVANFLLFGDQTVEKLPAIRHLVSHGASSPLVQRFLREVCDAVQLQVSKLPLHSEQRSNIGNFDSILRLAENNARLEEPNEIIATVLMNIARLGELILYAEQDPTVLASKGNRNCILGFCTGEVAAAVAAVAQDTNELVELGVEVTHIIFRMARELNRRSLMVDRTNGPWARTILGISVDRVREILQDFHENQSIPRARQVCIGFVSDGWLTLFGPPTTLQRLLEWSAELEDAPQIDTDARGGVHMETLPEVDLDRILGSSAWLDRAPVHTATIISPYTCKPRQQKTLRGLLEEIIADVGQRTLNLATSMNAALELAQADKLRLVMPGYTSHDVYFLKLLQKRGIEYSVMSHGDHLSSGPSRQGSGLVAVVGMSGRFPGSGDINAFWEGLLEGKRYIQEIPNTRFDLEQWYDATGKQKNSTMARTGAFLDKPGMFDNRLFDMSPREAMQTDVQHRLLMTTSYEALEMSGYYPDGTLSTNKDRVASFFGQTSDDWREVVVHQGVDIYFATGSCRAFGPGRLHHHFKWGGPSYSVDSACSSSIAAVGLACSALLGRECDMALAGGGSLLLSPSPFSGLSRGGFLSAHGGCQTFHDNADGYVRGEGVGVVVLKRLEDALDDQDNILGVVRGSGRNYSSDASSMMHPSANSQKKLYCDVLEQSGVDANSISYVEMHGTGTQAGDFMEMSSVLSTFAEKRGSDNPLIVGALKANIGHGEAAAGVCALIKTLMMLQSRQIPPQPDLPGPINHRFPDLAARNVYIAARNMRLEASPVAKGTLRVFLNSFDASGGNSCLLLEEAPPRAVKDADPRSHHLVTLSARSQKSLVGIKERYLAHLRQHPGTKLADLAYTTSARRIHGLLRYAIAASSIDEVVQCLETDLAQGKTPRQPPATPTVVFTFTGQGAHYVGMGANLWETSATFRNTLHDYQTMASAQGLPHFLHLITESSTPTPQSGPDTVQVQLAMVSLELALAKLWRSWGIQPAMVLGHSLGEYAALCVAGVLSVSDTLYLVAKRAQIMAGALTPHEYGMLAVNLSVADTREVLSSGQHTSCAVACINAPKMTVVSGLHSKLDDLQDQLKSDGTRCTPLSVPYGFHSSQLDPILGQFEDVCQGVTFSAPNVPVVSTLLATTVREEGTFSPEYLARQAREPVDFVGALGAVQEHKFPSMMFLEIGPDPVCSGLVNATLGADEAALRCVASMHRGKANWASISCSLRDLYTAGAAIDWPAHHRDFKSSVSLLDLPKYSFDEKEFWASFPDRDLQTIGDVETKNSQPPAIVPSVQGYCTTTLQRITRETIEPDGLSVTFSSDLADQHLRAAVRGHAVADVEICSSSLLLDMALSAAQYAYMKHSPGQKMPVPLTVRNCYFHRGVVLTDKAQTVEVTVTLTSSAKTADIRYHCRTPDEYYEVGACQVVLKPASKPDQAGFLVRSRMAALKASASHRLGRRAVYRLFDNVVRYSEQYQGLDNVHLSEDMQDAVAEINMAHVPAAGGHYLHHPFLLDSIVHLSGFLVNNGLRYSSEWACLSTGFDEWHLLKPLDPTTVYTSYTFMEDSRSTSNLITGDVYVYDGEELASVLTGLQFQKMKRTALTHLLSPPTVGNMAAKPSTCMPTMAQTELLPAQARVAGSPVPTPPATACVDDGEGEKFDLVNTLFSIIAREVGVEPSDLEGDVNLANLGIDSLMAITIISVMQQETGVELPGTFFLDNATTTAVIAAVG

SEQ ID NO: 210 - protein, 380 aa, Artificial Sequence
  PKSC6C
MSSAVTVWQDALNIIAQESGLEPAEIIETDDTAFVTLGINQILATAILAHLRGPRGEPLPRDIFDQKPTVGAFRRFYETPIHLDIAPVAPIATPAPPKLKRVPSSSVPLSIVLQNNPASSRHTVFLLPDGSGSAMAYANLPPVHPAVCIVGMNSPYLRDAGSYRCSVEDLASQWVREIYRRQPRGPYIVGGWSAGGYYSYEVAKRLLQDGHAVAKLILIDSPCRTVFESLSMEVVNYLSSRNLMGNWGSPEMPEWLVQHFRSTLAAVGKYRPRPIDSAGKMQTYIIWSRDGVLDQDALAKSGLDTSVKVSRFLLQGKDDLGPNGWDQLLPSKEMAIATQSGTHFTMINKPHVAQMSDLLRDAVIGIGSDRQSHWQRVSES

SEQ ID NO: 211 - protein, 1467 aa, Artificial Sequence
  PKSC7A
MSSRAPAPKRHDVAVIGISCHFPCGADTADQFWDFICNGRTLYSEDIDGSATHAVHSYDKEINIDLIPGGHTTKRHVASLDASFCNLSNAEAESMDLQQRIIMEATYESIESAGLEVGQLAGSRTGVFIGSVTSDYRQMPHHHAETVPLYNLTGASNTPTSDHISWFFDLRGPSVTTNATYSSSLVACHLACQSLWSGESEIAIVGGTNLLLNPDMFLCCHNRQALAPKDKRKSLDESRGGYSRGDGVGVVILKRVADAVRDADPIRAVIRGSGCNRDGHTKEFTTPDVEAQTSLIVETYHSAGLSLAETRYVEAHGAPISLGDAPEMEGIARAFSPRRVASDKLLVGSIKSSVGHLATCAGLASLIKSVYILETGVIPPTQCACDVKPKVRCEEWHLKVPTTKAPWPAEGLRRISTHGFGYGGTNAHLILDDAAHYLEARNLRGHHYTRIRPQPQRLSTSAAYREEPKVNPPRLFLFQASNREGLGRLRASLAQHLSQRLKSWPEDSRDSAVHLQKIAFALASRRSHINWRTYAVASTLEELLNVLKHGERAWATPEVRGAATSLRLGFVFTGQGAHWARMGLDLMVYPVFRQSVEESDRFLREALGCSWSAVDELAKPQTASRLAEAAYSQTLCTVLQIAVVDLLEDWNISPTRVVGHSSGEIAAAYCLGALTKHDGLRVAYYRGILSSEMRQSQQDQRGAMLAIGASRGRVEEWLAQLTRGKVVVACINSPTSVTASGDEEGNDELLSMVQRAGVFGRKLQVNVAYHCHHMESLSTAYAELLKQLEPLQARKGRAMHSSVLGGVIEAAELGAAYWVRNLVSLVRFSEAVSSLISHEDRPAVDVLVEIGPHPALKGPVQEILHAQGVSAVKYMCVISRGRGGGVKSALTLAGELVLSNVPVEIGHVNLDTDLPPSLLMDLPPCLWNCSARSRAKNRLSKDYRLRRHAHLPLLRNSRLTTCGSERCWRGVVTLQDSPWIRDHQIQGSILYPSTVFLTMAIEAASNKANENRKMSALRVTGVHFDDALMVTEDSTTEAILRLRTLPLPAASSQSPWMEFTVSSSIEGGVLRQNCAGLIMIEYEIDADPFVDSGRTLESDMVRDGYKKTDSSCRQSVELGKLYSRLAPLGPDYGTTFANMTEIRKTGEGQCIGTVRLVPPAHESHPRLIHPGTLDAVFQLAFAALEDSLLLGPMVPSKIDEVVIAAEIPNSLGALLHGVPQSSLHDPRELVSDIDMLDDESSRVVVQIKGLRWADVSGGRITPAAAASSETRPIGFRVERKPAADLLAGEQLQTYVGRLAEQGDVPNLARAATLNNHVGRLATCRSAQAAGISTPFYFDDPRFSILAQPRDSDVASSSTSDAGDGSAGEVSVRTQLSQAQSVAEAVAAIQAALLERVARTLQIALLDIDPSKPLHSYGVDSLVAVETVKWTIKTLDAKLTVFDLLSNEPVTALCEKIASISTLVKLTS

SEQ ID NO: 212 - protein, 1732 aa, Artificial Sequence
  PKSC7B
MSSELGVTKILLFGDQTVEKLPAIRRLVSHASSSRLVQRFLREACDAVQLEVGKLPAHSEERRNIGNFDSILRLAEDNSRLKEPSEIVATVLMNIVRIGELLLYAEQDVTVLASESSRNCILGFSTGELAAAVAAVAQDTNELVGLGVEATHIVFRMALELFHRSVMVDRTNGPWARTVLGISADRVRKILVEFHESHSIPRVRRACVGFLSDSWLTVFGPPTTLQQLFEWSAELEDAPHIETDACMGVHMETLPELDLGRILGSSAWLNRAPGRTTTIVSPYTCQPRRQQTLRGLLEEILMDVGQRTLHLAAATDAILDLARTDKLRVVMPGYTSHDVHLLKSLQRRGIEYSVMSHGDHLASKPAREGSGRVAIVGMSGRFPGSSDVDTFWEGLLQGKRHVQEIPSTRFDLEQWYDATGKQKNSTMARTGAFLDRPGMFDNRLFHMSPREAMQTDVQHRLLMTTSYEALEMAGYFPDGTPSTNRDRVGSYFGQTTDDWRELAFQQGEDIYFTTGSNRAFGPGRLQHHFQWGGPSYSVDSACSSSVAAVGLACSALLGRECDMALAGGGSLLLSPSWFSGLSRGGFLSTHGGCQTFHDDADGYVRGEGVGVVVLKRLEDALDDQDNILGVIRGSGRNYSSDASSIMHPSVKAQQQLYRDVLESSGVDANSISYVEMHGTGTQAGDFTEMSSVLSVFAEKRGPDNPLVVGAVKASIGHGEAAAGVCALIKTLMMLQSRRIPPQPELPGPVNHRFPNLGARNVHIAARNMRLEASPVAEGTLRVFLNSFDASGGNSCLLLEEAPPRAVKDADPRCHHVVTLSARSQKSLIGIKERYLAYLRRNPGIKLADLVYTTNARRTHGPLRYAVAASSVDEVMQGVEADLTRGGTPGHVGETPAVVFIFTGQGSQYSGMGSHLWKTWAAFRNKLHDYQTMASAQGLPHFLDLITENSASSQQPGSDAVKVQLAILCLELALAELWRSWGVRPATVLGHSLGEYAALCVAGVLTVSDAIYVVAKRAQIMAEALTPHKYGMLAMNLSVDDAREVLSSGKHVSCAVACINAPRMTVVSGPRLELEELQNQLKSDGTRCTYLPVPYGFHSSQLDPILAQFEAACQGVNFSTPHLPIVSSLLATSVRGDGTFSPGYLARQAREPVDFVGALAAVQEQRFPSPVFLEIGPDPVCSGLVNASLGADGTKVRCLASMHREKDNWASISSSLRDVYVAGVAIDWPAYHREFKSSVSLLDLPKYSFEEKEFWAPFPGRSSRAIGEAEADQGQPHVVKPSVQGYFTTTLQRVVKETVQSDGCSVTFTSDLTDQDLRTAVRGHVVAGAEICSSSILLDMALSAAQYVYAKQTSGQSLPFPLTVRNCCFHRAVVFAEKAAQTVEVSVNLASSSKTADVQYRCRTSGESYEVGTCQVVPGPAGKPAQAGFLARSRMAALKASASHRLGRRAVYRLFDNIVRYSEEYKGLDNVHLSEDMQDAMAEINMAQASAAGGHYLHHPFLLDSIVHLSGFLLNNGLRYSDEWACLCTGFEEWHLLKPLDPANVYTGYTFMEESSSTRNLVTGDVYVYHGDDLVSVLAGLQFQKMKRTALTHLLRPPTVRNAANEASSYVPAAPQTKAKAWPAQPIATIHQVNNVAGPEVPAPPTPASMNGGGQPGLVDALFAIVAREVGVERSDLNGDMSLEDLGVDSLMAVAIISAVQQETGVELPAAFFLDNPTTTAVTEAAGRLSACC

SEQ ID NO: 213 - protein, 377 aa, Artificial Sequence
  PKSC7C
MSSSVTLWQDALEIIAQESGLEPAEILETDDMEFARLGVDSILATAILSHLRGPRGEALPQDIFNQKPTVGALRRFYETSIHLTIAPTLTPAPTTKLDRKATPVPLSILLQNDPVSSRHTVFLLPDGSGSAMAYANLTLIHPEVCVVGMNSPYLREAGSYRCSVEDLAAKWVLEIYRRQPQGPYSVGGWSAGGYYSYEVAKRLLQDGHAVDRLILIDSPSRNIFEPLSMEVVNYLSSRNLMGNWGSREVPQWLVEHFRFTLAAVGNYSPRPIDSAGGMETYIIWSRDGVLDQDELAKCGLDLSVKVSRFVLQGKDNLGPNGWEELVPSKKIAIGTQSGTHLTMMNDPHMSQMSHLLRDAVVGITPGRQSHWQRVIKA

SEQ ID NO: 214 - protein, 2510 aa, Artificial Sequence
  PKSC8A
MSSQAPAPSRDDIAVVGLSCRFPGEADTAEHFWDFICNGRNAYSENPDRWTPDAFHYGEKKINTSLPRGGHFMKQDVAAFDANFFNLSKVEAESMDPQQRIIMEVTYESMESAGLRVDQLAGSRTGVFMASFTSDYREMLYRDAETAPLYTATGTSNTSTSNRVSWFFDLRGPSFTVNTACSSSLVACHLACQSLWSGETESAIVGGTSLLLNPDMFLYLSNQQFLAPDGQCKSFDESGDGYARGDGIGVVILKRVADAVRDGDPIRAVIRGSGCNQDGHTKGFTIPSVEAQASLITETYRNAGLSLAETRYVEAHGTGTQAGDTREMEGIARTFSQHRTASDELLVGSVKANIGHLEACAGLASLIKCVYILETGVIPPTPSVRVLNPKIRWEEWHLKVPVTQTIWPTEGLRRLSTQGFGYGGTNAHLILDDAAHYLEARNLKGHHYTRTHPQPRRLLTSAMHEAVSDEQPPRLFLFRANDREGLGRVRSSLAQHLEQLLKSWPQDSRDGGAYLHNLAYTLASRRSHLQWQTYATASTPEELLQVLQHEGGAWAAPETRLAASPPRLGFIFTGQGAQWARMGVELMAYPVFRQSVEASDEFLRTALGCPWSAVDELAKPQATSRLSEAAYSQTLCTVVQIATVDLLEDWNVCPTRVAGHSSGEIAAAYCLGALTKHDSLRVAYYRGILSSEMQQTHGDRKGAMMAIGASPEEVESWLAKLTRGRVVVACINSPTSVTASGDAAGIDELLAMVQQAGVFGRKLQVDVAYHSHHMQSVSSAYSELLKDLAPLPARPGRTMHSSVLGGVIDAAELGASNWVQNLVSPVRFSEAVSSLLSAGDKPAVDVLVEIGPHAALKGPVQQILQAQGVSAVKYTSVLSRGQSAVKTALACAGELVLSSVPVAMSRVNFESGPQPTPLVDLPPYPWNRSTRFWAETRLSREYRLRKHARLPLLGSPCPTMGARERYWRGMVRLDEEPWIRDHEIQGSILYPGAGFLIMAIEAASQQAGEQRKVSAFRLRDVHLDAALVVTEDSTAEAILQLRPHLLAPGSSQSSWMEFTVNSSIDGGDLRQNCSGLIMIEYAADADSAMDRERALESDMVCDWYKKTYVSCQQSVDVGKFYSRLASLGLVYGPTFANVTEIRRTGQGQCIGAVRIPAVDSLVPPAYRSHPHVIHPGTLDAVFHLAFAALEDSLLPGPMVPTTIDELVVAADTPNSPGTLLRGVSRSSPHGFRELISDIDMLDDQSSRALVQIKGFRCADVSGGRMTSSEAASAESRPISFRLEWKPAIDLLTGEQLRTHLDRRVKQEGASNVARATELNNHVHHLEETLPRVAVDPAMANLSDWLSAKSAKLTNGAASSSKRPSPGSDMPAMRDALTAVRAGSIPSPEQQDRMLREVEQNGALSILFKTLDAYIDLRHHAKPNLSILELSLDSVPYSVFAALPSRHKILQTAQYAIRVSQEGVADRVKAQFGSQASDVDISVADFTKKLDEGLGKHDVILIFDPGFVHAKLEVVLRNARKLLNPGGRIIVAEVGEPGLYLGTALGCLQWTRNLDVAQSSWTSCLARSGLTPALKLMDVDTESAVHGHFRLSLTGNAAESTNSDDGQPQQVTLIESANASATAQGIAAAVAQNLEKASIPTKRVRWGSDVSQLKGQPCIVLTDLESALLKDPAPEDLAALQSLFSHAESTLWVSGPLGPDAALITGLSRSVCNEAAGVQIRTLEVTDLPGPGADSYADLVTRVFRYRGPDTEFRWHSDALLVSRLVEDEVRNKEIAQLLGQGEKAAVATTLQEKPEGLKLCMRQIGMLDSVCFEPEPLEAGEVEVDVKASGVNFRDVMVALGQIPDRAFGFEGAGVVRRVHASETRLRPGDRVVFLAHGAHRTVHRVRADYAMPMPDTMSFEEGAAILLVHTTAWYALVKSARATAGQSVLVHAAAGGVGQAVLMLARHLGLQVFATVGSEEKRKLVHETYGVPHDHIFNSRDASFAMGVKRMTKGRGVDIVVNSLAGEALRQTWHCLAPFGTFVELGMKDILDNARLDMKPFLQDATFVFFNLNRVQKERPDLMGEALRETMALVRSGALKPATPLTSYPASQVEAAFRKIQTGQHLGKLVLTFQEGDVVPVVRPDLSLSDSGTYLLVGGLGGLGRSLARLLVQLGARRLCFLSRSGATSSEARALVKELELQHRVRVLVCKGDVSDAETVSRVVQQCRAALGPIRGVIQCAMVLRDGLFERMAHDQWTESTRPKVQGTWNLHEQIPVSDFFITLSSFAGVFGSRGQSNYAAAGAYEDAMAHHRESLGQRAITIDLGIMRDVGVLAENGITDYLREWEEPFGIREPEFHALIKSAIMSTTQPLTERSVVQIPTGLATARSAQAAGISTPFYFDDARFSILAQTRTSTGASSAAGPGDADAGKVSVRTQLSQAHSVAEAAAAVQTVLLERVARTLQSSVAEIDPSRPLHSYGVDSLVAVETVKWMFKTLDAKMTVFDVLSNVSITALCEKIASMSTLVKLT

SEQ ID NO: 215 - protein, 1745 aa, Artificial Sequence
  PKSC8B
MSSKLRVANFLLFGDQTVEKLPAIRHLVSHGSSSPLVQRFLREVCDAVQLQVSKLPLHSEQRSNIGNFDSILRLAENNAQLDEPNEIIATVLMNIARLGELILYAEQDPTVLASKGNRNCILGFCTGEVAAAVAAVAQDTNELVELGVEVTHIIFRMARELNRRSLMVDRTNGPWARTILGIPVDRVREILQDFHENQSIPRARQVCIGFVSDGWLTLFGPPTTLQRLLEWSAELEDAPQIDTDARGGVHMETLPEVDLDRILGSSAWLDRAPVHTATIISPYTCKPRQQKTLRGLLEEIIADVGQRTLNLATSMNAALELAQADKLRLVMPGYTSHDVYFLKLLQKRGIEYSVMSHGDHLSSGPSRQGSGLVAVVGMSGRFPGSGDINAFWEGLLEGKRYIQEIPNTRFDLEQWYDATGKQKNSTMARTGAFLDKPGMFDNRLFDMSPREAMQTDVQHRLLMTTSYEALEMSGYYPDGTLSTNKDRVASFFGQTSDDWREVVVHQGVDIYFATGSCRAFGPGRLHHHFKWGGPSYSVDSACSSSIAAVGLACSALLGRECDMALAGGGSLLLSPSPFSGLSRGGFLSAHGGCQTFHDNADGYVRGEGVGVVVLKRLEDALDDQDTILGVVRGSGRNYSSDASSMMHPSANAQEKLYCDVLEQSGVDANSISYVEMHGTGTQAGDFMEMSSVLSTFAEKRGSDNPLIVGALKANIGHGEAAAGVCALIKTLMMLQSRQIPPQPDLPGPINHRFPDLAARNVYIAARNMRLEASPVAKGTLRVFLNSFDASGGNSCLLLEEAPPRAVKDADPRSHHVVTLSARSQKSLVGIKERYLAHLRQHPGTKLADLAYTTSARRIHGLLRYAIAASSIDEVVQCLETDLAQGKTPRQPPATPTVVFTFTGQGAHYVGMGANLWETSATFRNTLHDYQTMASAQGLPHFLHLITDSSTPAPQSGPDTVQVQLAMVSLELALAKLWRSWGIQPAMVLGHSLGEYAALCVAGVLSVSDTLYLVAKRAQIMAGALTPHEYGMLAVNLGVADTREVLSSGQHTSCAVACINAPKMTVVSGPRSKLDDLQNQLKLDGTRCTPLSVPYGFHSSQLDPILDQFEAACQGVTFSAPNVPVVSTLLATTVREEGTFSPEYLARQAREPVDFVGALGAVQEHKFPSVIFLEIGPDPVCSGLVNATLGTDEAALRCVASMHRGKANWASISCSLRDLYTAGAAIDWPAHHRDFKSSVSLLDLPKYSFDEKEFWASFPDRDIQTIGDVETRNSQPPAIVPSVQGYCTTTLQRITRETIEPDGLSVTFSSDLADQHLRAAVRGHAVADVEICSSSLLLDMALSAAQYAYMKHSPGQKMPVPLTVRNCYFHRGVVLTDKAQTVEVTVTLTSSAKTADIRYHCRTPDEYYEVGACQVVLKPASKPDQAGFLVRSRMAALKASASHRLGRRAVYRLFDNVVRYSEHYQGLDNVHLSEDMQDAVAEINMAHVPAAGGHYLHHPFLLDSIVHLSGFLVNNGLRYSSEWACLSTGFDEWHLLKPLDPTTVYTSYTFMEDSRSTSNLVTGDVYVYDGEELVSVLTGLQFQKMKRTALTHLLSPPAVGSMAAKPSTCMPEMKRTALTHLLSPPTVGNMAAKPSACIPTMAQTELLPAQARVAGSPVPTPPATASVDDGEGEKFDLVNTLFSIIAREVGVEPSDLEGDVNLANLGIDSLMAITIISVMQQETGIELPGTFFLDNATTTAVIAAVG

SEQ ID NO: 216 - protein, 380 aa, Artificial Sequence
  PKSC8C
MSSAVTVWQDALNIIAQESGLEPAEIIETDDTAFVTLGINQILATAILAHLRGPRGEPLPRDIFDQKPTVGAFRRFYETPIHLDIAPVAPIAAPAPPKLKRVPSSSVPLSIVLQNNPASSRHAVFLLPDGSGSAMAYANLPPVHPAVCIVGMNSPYLRDAGSYRCSVEDLASQWVREIYRRQPRGPYIVGGWSAGGYYSYEVAKRLLQDGHAVAKLILIDSPCRTVFESLSMEVVNYLSSRNLMGNWGSPEMPEWLVQHFRSTLAAVGKYRPRPIDSAGKMQTYIIWSRDGVLDQDALAKSGLDTSVKVSRFLLQGKDDLGPNGWDELLPSKEMAIATQSGTHFTMINKPHVAQMSDLLRDAVIGIGSDRQSHWQRVSES

SEQ ID NO: 217 - protein, 2512 aa, Artificial Sequence
  PKSC9A
MSSEASSQSRDDIAVIGLSCRFPGEADTAEHFWDFICNGRNAYSENPDRWNPDAFHYGEKKLNTSLPRGGHFMKQDVAAFDANFFNLSKVEAESMDPQQRIVMEVTYESMESAGLRVDRLAGSRTGVFMASFTSDYREMLYRDAETAPLYTATGTSNTSTSNRVSWFFDLRGPSFTVNTACSSSLVACHLACQSLWNGETESAIVGGTSLLLNPDMFLYLSNQRFLAPDGQCKSFDESGDGYARGDGIGVVILKRVADAVRDGDPIRAVIRGSGCNQDGHTKGFTIPSVEAQASLIEETYRKAGLSLAETRYVEAHGTGTQAGDTCEMEGIARTFGQHRGDSDDLLVGSVKSNIGHLEACAGLASLIKCIFILETGVIPPTPSVRVLNPKIRWEEWHLKVPSKQTPWPTDGLRRVSTQGFGYGGTNAHLILDDAAHYLEGRSLRGHHYTRTHPQAQRLLTSAIHGASPKEQLPRLFLFRANDREGLGRVRASLAQHLDQLLPSWSQDSSGRDAYLQNLAFTLASRRSNLKWQTYATASTPDELLQVLKTKGDAWASPEARLAASSPRLGFIFTGQGAQWARMGVELMGYPVFRQSVEESEHFLRETLGCPWSAIDELAKPQTTSRLSEAAYSQTLCTVLQIAIVDLLQDWNVSPTRVAGHSSGEIAAAYCLGALTKQDSLRVAYYRGILSSEMQETHKDQKGAMMAIGASPETVAQWLAQLTRGKVVVACINSPTSVTASGDAAGIDELLSIVQEAGVFGRKLKVDVAYHSHHMQSVSAAYSALLKDLKPLPAHEGRTMHSSVLGGLIDTAELGASNWVRNLISPVRFSEAVSSLILDGDKPAVDMLIEIGPHAALKGPVQETLEAKGVSAVKYTSVVSRGQNAVKTALACAGELVNSSVPVAMDRVNLESELQPSPLVDLPSYPWNRSTRFWAESRLSQEYRLRKHARLPLLGSPCPTMGARERYWRGMVRLDEEPWIRDHEIQGSILYPGAGFLIMAIEAASQQANEQRKVSAFRLRDVHLDAALVVTDNSTAEAILQLRPHLLAPGSSQSSWMEFTVNSSIDGGALRQNCSGLIMIEYEADADSAMARERSLESDTVCDLYKKTYISCRQSVDVAKFYSRLASLGLTYGPAFANLTEIRRTGNGQCTGAVRVPAVESLVPPAYRSHPHVIHPGTLDAIFHLAFAALEDSLLPGPMVPTTIDGLVVAANTPNEPGTLLRGVSQSSPHGFRELISDIDVLDDQSSRAVVQIKGFRCADVSGGSANSSDAEPAEARPISFRLNWKPAIDLLSAEQLRKYVGRVAKQADASSHLIRATELNNQVGNLPETAPSAALDAVTEKATRWFAAKSAKLVDGAATASSASSSGGYVDATRDAWAAVREGRIPSPEKQDRVLREVEKNGALSTLLGALDAYMDLRHHAKPNLSVLELSLDAVPYSIFAALPSRQSILQTAQYAIRVSQDGVQDRIRSQFGSQGSGIDVAVTDFTQKIDETLGKHDVILIFDPGFLHAKLEVVLRNARKLLNPGGKIIVAEVNEPGLYLGTALGCLHWTRNLDVSQSSWTSCLSRFGLTPALELIDANTDATGHGKFQLRLTGSAAESNGSSSHQPQQVTLIESADASEMAQGVAEAVAQRLQEASIPTKRVHWGCDVSQLKGQPCIVLTDLQSALLKDLAPEDLAALQSLFLHAESTLWVTGPLGPDAALITGLARSVCNEAAGVQIRTLEVTDLPISAAAGYADMVARVFRYRGSDTEFQWHSDALLVSRLTEDEDRNEEIAQLLGQGETAAAETTLQETPEGLKLCVRQIGMLDSACYEPDPLALEPLEAGEVEVDVKASGVNFRDVMVALGQIPDRAFGFEGAGVVRRVHAEESRLRPGDRVVFLAHGAHRTVHRVRADYAMPMPDTMSFEEGAAVLLVHTTAWYALVKSARATAGQSVLVHAAAGGVGQAVLMLARHLGLEVFATVGSEEKRKLVHETYGIPHDHMFNSRDSSFAMGVKRMTNGRGVDIVVNSLAGEALRQTWHCLAPFGTFVELGMKDILDNARLDMKPFLQDATFVFFNLNRVQKERPDLMKEALRETMALVSSGALKPATPLTAYAASQVETAFRKIQTGQHLGKLVLTFQTGDVLRVIRPDLSLGDSGAYLLVGGLGGLGRSLARLLVHLGARRLCFLSRSGAKSSEAQALVQELELQHRVRVLVCQGDVSDSDTVARVVQQCTTTLGPIRGVVQCAMILRDGLFERMTHEQWTESTRPKVQGTWNLHEQIPSADFFITLSSFAGVFGSRGQSNYAAAGAYEDALAHFRTSLGQRAITIDLGIMRDVGVLAEQGITDYLREWEEPFGIREHEFHALIKSAIMSATEPPTERSVVQIPTGLATARSAQAAGISTPFYFDDARFSILAQTRTAAGASSANADDGKVSIRTQLSQAQSVAEAASAVQTVLLERVAKTLQSSVSEIDPSQPLHSYGVDSLVAVETVKWMFKTLEAKLTVFDVLSNVSIVVLCEKIATTSTLVKLS

SEQ ID NO: 218 - protein, 1723 aa, Artificial Sequence
  PKSC9B
MSSKIRATNFLLFGDQTVEKLPAIRQLVGHAASSALLQRFLRQVCDAVQLEVAKLPMHSEQRSNIDKFDSIIRLAENNARLDEPNEIVATVLMNIARIGELILYAEEDPTVLVSKGNRNCILGFCTGEVAAAAATIAQDSNELVELGVEMTHIIFRMARELNHRSLMVDRTNGPWAKTILGISVERVQEILHEFHESESIPRVRRVCVGFIAEGWLTLFGPPTTLQRLFEWSVELEDAPQIATDARGGVHMKTMPDVDVDWILGSSVWLDRTPVHTATIFSPYTCQPRQQQTLRGLLREIITDVAQRTLYLAKAMNAALEFTKADELRVVMPGHTSHDVYFLKSLQKRGIEYSVMSHGDSPPSAPGRQGSGLVAVVGMSGRFPGSGDINAFWEGLLEGKRYIQEIPNTRFDLEKWYDATGKVKNSTIARTGAFLDKPGMFDNRLFDMSPREAMQTDVQHRLLMTTGYEALEMSGYSPDGTPSTDTSRIASYFGQTSDDWREVVVHQGVDIYFATGSCRAFGPGRLHHHFKWGGPSYSVDSACSSSIAAVGLACSALLGRECDMALAGGGSLLLSPSPFSGLSRGGFLSAQGGCQTFHDNADGYVRGEGVGVVVLKRLEDALDDQDNILGVVRGSGRNYSSDASSMMHPSANAQKQLYRDVLEQSGVEANSISYVEMHGTGTQAGDFMEMSSVLSTFAEKRGADNPLIVGALKASIGHGEAAAGVCALIKTLMMLQCRRIPPQPDLPGPINHRFPDLAARNVYIAARNLKLEASPMAKGVLRMFLNSFDASGGNSCLLLEEAPPRAVKDEDARSHHVVTLSARSQKSLIGIKEKYLAHLSQNPGIKLADLAYSTTARRMHGLLRYAIAASSVDEVMNSLETDLAQGKTPRQPPVAPSIVFIFTGQGAHYLGMGSELWKTSAMFRNTLQKYQTMASAEGLPYFLDLIVGNSTSTQQSGPDTVQVQLAMVSLELALAELWRSWGIQPAMVLGHSLGEYAALCVAGVLSVSDALYLVYRRAQIMTEALTASEYGMLAVNLSVCDTREVLSSGQHASCAVACINAPKMTVVSGPLPKLEELQNQLKSDGTRCTPLSVPYGFHSSQLDPILDQFEAACQGVTFSAPKVPVVSTLLATVVREEGTFSPGYLARQAREPVDFVGALGMVQEQSLASLVFLEVGPEPVCSGLVNATLSAGETKARCFASMHRGHENWASISSSLRDLYMAGAPIDWPAFHHDFKSSVSLLDLPKYSFDEKEFWASFPNRDMQGTGEVEPKQSQPPVIVPSVQGYCTTTLQRIVKETDQPDGLSVTFTSDLAEQHLRAAVRGHAVADIEICSSSLLLDMALSAAQYAYLKHSPGQKMPVPLTVRNCFFHRAVVLTEEAQTVEVTVTFRSSTKTADIQYYCRTSDEYYEFGSCQVTLEAPRKPDQAGFLVRSRIAALKESASHRLGKHAVYRLFDNIVRYSEQYQGLKNVHLSEDMRDAVAEINMTQVPAAGGHYLHHPFLMDSIVHLSGFLVNNGLRYSSEWACLSTGFEELHLLKPLDPATVYTSYTFMEDSPTTSNVIGDVYVYDGAELVSVVTGLQFQKMKRTALTHLLSPATARNTAAKTIPHRPTTAPAKALSDQQPITTIQAEAAVPQASTPSTAASVNGGEGEKFDLVETLFSIIAREVGVDSSDLKGDVNLANLGIDSLMAITIISVMQQETGIELPGTFFLDNSTTTAVIAAVG

SEQ ID NO: 219 - protein, 384 aa, Artificial Sequence
  PKSC9C
MSSAVTVWQDALEIIAQESGLEPAEIIETDDMEFARLGINHILATAILSHLRGPRGEPLPRDIFDQKRTVGAFRRFYETSIHLETSPITPILAPKRAQLKREKSFTVPLSIVLQNSPASSRHTVFLLPDGSGSAMAYANLPPVHPTVCVVGMNSPYLRDANSYRCSVENLASQWVQEIYRRQPRGPYIVGGWSAGGYYSYEVAQRLLQDGHVVDKLILIDSPCRTVFESLSMEVVNYLSKHNLMGNWGSQGLPDWLVQHFRSTLAAVGKYRPRPLHSVGEMETYIIWSRDGVLEHDALVESGLDMSIKVSRFLLEGKDDLGPNGWDELLPSKDIAIATQSGTHFTMINKPHVAQMSDLLRDAVTGITTDRLSQWQRVRKDEQGK

SEQ ID NO: 220 - protein, 2280 aa, Artificial Sequence
  PKSC10A
MSSDPQHRMLLEVTHQALDSAGLAAHSLAGSRTGVYAAHFTSDYREAIFRDAEAAPLYTNTGTNATSASNRVSHLFDLRGPSFTVDTACSSSLVACHLACQSLLSRETDTALVGGTSLLLNPDMFLYLSNQKFLSPDGQCKTFDAAGDGYGRGEGVGVLLLKRVSDAIRHGDPIRAVIRGTGCNQDGHTKGFTIPSVDAQAALIRETYSKAGLDLAQTRYVEAHGTGTQAGDTREMEGLSRTFSPHRSSADKLLVGSVKTNIGHLEACAGLASLIKSIYILESGIIAPTASVRVPNPKIEWDQWHLAVPAVPTPWPTPGLRRISTQGFGYGGTNAHVILDDAAHYLQAKGLSGIHYTRTAEPSTRRAPATDQPRLFLLRAHDGDGLKRVRASLAQHLVQHLDRPNPWPDSATYLHDLAHTLSSRRSQLQWQTFVTAASEAQLVEALGQDSWPNPELRRAATAPRLAFIFTGQGAQWARMGVDLMAYPVYRQSVLDSDHFLRQTLGCCWSAADELAKPQASSNLSQAAYSQTLCSVLQIALVDLLEHWNITPTRVAGHSSGEIAAAYCLGALSKHDALRVAYHRGTLSSEMQQTHKHRQGAMMAVGASAGQVQGYLPRLTRGRVVVACINSPSSVTASGDAAAIDELLDLAQKDGLFARKLQVDVAYHSHHMESVATAYAQLLANMETQPARPGRSMHSSVLGGPIDASQLGAANWAIDTLVEIGPHSALKGPLQQILKDCGLTGVGYASMLSRGAHAIKTALACAGELVISGVPAAMGHVNLEADARPVVDLPPYPWNHSAQFWAESRLSQEYRLRKHPRMPLLGSPCPTMGARERLWRGFMRLDEEPWIRHHEIQGSILYPGAGFLTMAIEAAAQQARDQDASVSAFRLRDVHLDAALVVTEDSSVEAILQLRPHLPAPGSSTASWLEFTVNSSIDKGPLRQNCSGLIMLEHHADPHSAMGRERALDTDTLCQRFKQTRQLCRQPVDVPDFYSRLTALGLRYGPSFANVTEIECADQGRCVGAVRIPVLDSMGDNSHVIHPATLDAVFHLAFAALDGASLSAPMVPTSIQELVIAADTPSTPGTLLRGLSHSEPYGFRELVSDIDMLNEQGTKALIQLKGFRCAALSTTPTPVADGRPIAFGVSWKPAAALLTSKELQAYISRSAVPCTVSVDSESLDKSPSSSALADMESKGALAALVQPLDAYIALRRHSKPNLSIVELTAQSVPYSLFAALPSRHSLLQTAHYAIEASAQAARDQIKSQFGPLASEIDITTDVHDKHDLVLVFDSGLSKAQTEALVQKAAKLLGPGGAIILAELKANEANSWTSSPLSALDLTPPLNLVDSQSQGSKHFRLCVSDTAPKPNGVKHHEAQQVALIETANPSKLAQAITAAVAQRLQDASISASRLSWPCDVSQLKGRKCIVLADLETALLKDPSPADLAAVQSLFSHANQTLWVSGPLGPDAALITGLARTVRNEAVGIQLRTLELADVALTDADACADAVCRVFDAHTSDDEFRLVSATLQTSRLVEDEERNEELAQMLGRKEKTPVASKIQEPPQPIKLCVGQVGMLDSVCFEPDGLALEPLGEDEVEINVKASGVNFRDVMVALGQIPDRNFGFEGAGIVRRVGSAKTGFSVGQRVMFLAHGAHRTVHRVAADFVVSMPDGLSLVDGAALLLVHTTAWYALVRTARATAGQSVLIHAAAGGVGQALLMLARHLRLEVYATVGTDEKRKLVRERYGVPDDHIFNSRDLSFVAGIKRMTRGRGVDIIVNSLAGEALRQTWYCLAAFGTFVEVGMKDILDNARLDMRPFLRDATFAFFNLNHVQKERPDLMREALRETMALVRAGVLEPATPTTSFPASQAETALRRIQTGQHMGKLVLTFDTGDMVPVLRPSVGLSASGSYLLVGGLGGLGRSLARLFISLGARNLCFLSRSGAESSGTKAFIHELEAQAGVKVLVCKADVSHGEHVAQAVQRCTATLGPIQGVVQCAMVLRDGLFERMTHSQWLESTRPKVQGTCNLHHHVPSSAWLITLSSFSGIFGNRGQSNYAAAGAYQDGLAQLCHAQGRRAVTLDLGIMRDVGVLAEKGITDQLREWEEPFGIRESELHALVKSAIIATTQPSGRSPAQIPTGLATARSAKAAAISPPFYFDDARFSMLAQTRLDSASSATASSSSPSDGDKPSVESQLAQVHSVDQAAALVQTVLLERVAKTLQSASSEIDPSRPLHSYGVDSLVAVEMVKWMFKALHAKVTVFDVLSNVPITALCEKVASVSTLVKID

SEQ ID NO: 221 - protein, 1708 aa, Artificial Sequence
  PKSC10B
MSSLDTGDLDFILFGDQTVEKLPAIRQLVSHASESRLVQRFLREACDVVQIEVSKLPAHSEQRRGIGSFDSILRLAEDNAALDEPNEIVATALMNIARLGEFILYAEEDPSVLVSGGKRSRILGFCTGELAAAVAAVAQDSAQLVDLAVEATGIGFRLARELHRRWTMVEATNAPWARTVLGVPADRVEAILQEFHESEMIPRVRQACIGFVSDNWLTIFAPPKTLGRLFCWSSELEEAPSIDTDARGGVHMPTLPALDIDYILGSSTLLTCVPSPKAVMTSPYTCQPRRQATLGGLFAEIIDDVAQRTLKLSASIDAALDNIQVRKLRAVLPGYTAHDVSLLKALKKRGIEYTVMAHGSKPAARSSGRQGSGRVAIVGMSGKFPGSGDVETFWENLMEGKRYIEEIPNTRFNLEKWFDKTGKQKNSTLARTGAFVDQPGKFDHRLFNMSPREALQTDVGHRLLMTTSYEALEMAGYFPDGTPSTARERIASYFGQTTDDWREMVVHQGVDLYFATGNCRAFGPGRLNHHYKWGGPSYSIDTACASSISAITLACSGLLNRDCDMAVAGGGSVLVSPHLFSGLSRGGFLSANGGCQTYQDDADGYVRGEGVGVVVLKRLEDALDEDDRILGVICGSARNYSSDASSIMHPSAPAQEELYRQILGQAGTDPNSISYVEMHGTGTQAGDLVEMTSVLSIFAQNRRRDNPLTVGAVKANIGHGEAAAGVCALIKTLMMLQTRQIAPQPHLPGPRNHEFPDLEALNVRIAGANMTLDPSPLAKGEVRIFVNSFDASGGNSCLLLQEAPMPRTKVADPRTSHVVTLSARSHKSLAGIKQRYLDYLRQHPHTQLADLAYTTTARRMHSSLRYAMAVSSIEQAVLSLETDLVKDKPPTVASIVFVFTGQGAQYAGMGSRLWHTSPTFRSRVNDLQSVATALGLPRFEHLISDAKAGHEEADAVQMQLAVLALELALAHLWQAWGLVPAAVFGHSLGEYAALVVAGVLSPSDALLLVGRRAQIIAATLAPHEYAMLAVNLDVDRARALLAGGEHPECAVACINAPAMTVVSGPRQSLDSLQNQLKEQETRCTRLAVPYGFHSCQLDPILAEFESACRGVEFGAPKIPVMSTLLASKVDASGTFSPSYLARQSREPVDFVGALQALHQQALPNMVFVEIGPDAVCSGLVASTMRSLDTQPACYASLQKDKDDWACLSSALSNLYMAGVAIDWPAFHRDFKDSVSLLDLPKYAFDEKEFWQSFPDPLVEGNGGSIEAHTKAQAQYSTTLQRIVAETVQTHQVCVVFESSLDDVHLRAAVQGHAVADAQICSSSLLLDMALSAAEYALSKHAPHQAMSCPLSVQKCIFDRALVLGPEAQTLTLTATLDVSTKIVHVDYTCRTADEVFELGRCQVHLAPASPLPDAGFLVRSRIAALKASAGHQLGKKAVYRLFDSVVRYSEEYQGLARVYLPDDMQDALAEVSMAHVPVAGGHFKHHPFLLDAIVHLGGFLVNNGLRYASNVACLSTGFDALHIFKALRPDTTYTSYTYMEDSATAANLVSGNVYVFDDQELVAVVSGMHFHRMKMAALRHLLRPANHGAATSTKATTQLPEPGVCASAASAASAAPAAPAAPAPAKVEEEKSSSSLVEQLFDIIAREVGIEASDLQGNVDLGELGVDSLMAITIISVMHAETGVELPGTFFLENSTTGQIGAAIAARG

SEQ ID NO: 222 - protein, 365 aa, Artificial Sequence
  PKSC10C
MSSALTAWSGALRIIADQSGLEPDEIVEADDMQFTALGINRILAGAILSQMRGPGGEALPKDFFDRVPTVGAFRRYYEKAAPVRPAKLTRTLSPIALSIILQKSPAVAKHVLFLLPDGSGSAMAYAGLPAVHADVCIVGLNSPHLRDASKYTGTIEQLAETWVHEIYRRQPKGPYMVGGWSAGGYYSFEVAKRLLRDGHSVDKLVLIDSPSRTVFESLPIAVVRHLAARNLMGNWGSQDPPEWLIPHFQATVAAVAKYHPTPMSRASQIKTYLIWSRDGVLDTQGMASSGLDARVKVSRFLLQGKQDWGPNGWDDLLPGQACAIATTGGTHFTMVNKPHVAELSALLSDAVAGTCPQRQHLWKQD

SEQ ID NO: 223 - protein, 2414 aa, Artificial Sequence
  PKSC11A
MSSAVDEARWAQDIAVVGMACRFADDADSFPKFWDFICKARSAYSENQDRWNPDAFHYPGKKINTSLPRGAHFFKQDIATFDANFFNISKVEAESIDPQQRMAMETTFEAMENAGISTDKLSGTSTGVWMANFTSDYREMLFRDSETAPMYTLSGASNTSTSNRISWFFDFKGPSFTLNTACSSSLVATHLACQSLSLGESSTAIIGGTSLLLNPDLFLYLSNQNFLSPDGKSKAFDASGDGYGRGEGVAVIMLKRVADAIADGDPIRAVIRGTSSNQDGRTKGMTLPSADAQEQLIQTAYRNAGLSMAETRYVEAHGTGTQAGDKTETEALSRTFSPHRTFSEPLILGSVKANIGHLEACAGLASIIKCVGILETGLIPANPCYKNGNPGIKWREWNLHVPTTLMRWPTKGLRRVSTQGFGYGGTNAHVILDDAYHYLESRALTGSHNTKLLAGLSTKPRLPNGVPNGVGSRGKDSHSRIFHFSAQDNDGLGRTRQAVSQYLKTRSKELKEAHDSEDEYLRNLAYTLSERRSRLQWQTSTVASSIEELIESLQTKPWPNPEIRATSKFPRVGFVFTGQGAQWPRMGVELMEYDIFRESVEKSDHYLLAELDCPWSAIEEIAKPDSSSNLGLASYSQALCSVLQIALVDLLNSWNISPCAVVGHSSGEIAAAYCLGVLSHEDALKAAYFRGSLSAEMKENDSSLRGSMMAVGAKPTEVEKWLEKVTKGDVVIACVNSPTSVTLSGDTEGIEELEPMLNEAGVFARKLKVDTAYHSPHMQIIAGQYFEAIADITTMPAKKGCRMHSSVQGALIDPNELGAANWVRNLVSTVQFADAVHDLLRPLTNGERATENAVDILVEVGPHSALQGPVSQTMKNYGISGVNYCSVLSRKKNAINTALSCAATLYSEGLSVDIRTANRDSNYTAKPLVDLPSYPWNHSAQYWAESRVSKEYRLRKHSRMPLVGAPAPSMGGDKIWRGLIRPAEEPWVRDHVIQSTVLYPAAGFLTMAIEAARQNAEPGKQVSGFRLRDVSIDAALVIDDDVEPEVVLRFQPHRMGTLDAGSISWHEFTVSSSTDGKELRQNCSGLLAIEYKPAEGSSMQIERIKEIESIKERSIKAKEQCETYLDVGEFYSHLDSVGLTYGATFANLTEIHTDAIAGLGTGRLLIPDIESAIPPYMSERPHIIHPTVLDAIFHLAFAAISDHPRSFKGAMVPTSIAEVLVSNDIPFHKGESLQGFAQSTRHGFRELITDINVFDENFNDAVVQIRRFRCADVSGGGDAGDSTEGNSVKPITFRTVQRPSLDLLAPEELRKILISSSSDTIDQTLKQSTLDLIKETLIKCLLLLHHVQPELSILEIVDSTSRSITGSLLPQLNCADDILETSNYTVSVKNEKVAGAVADQLGVFKDRVNVEVNALDKDERSEGGQLDLILMFNTVLDNPSFQTLLENAKKQLKEGGRICIIELGQPSLHLGLTLATLHQTEDDHEFQLVIGKSPKPASSSIPEEIVIVEAPQATNSAQKLASHLAEELGRQSIRVNRLEWTSKNYISSIEGRSCIVLADLEKAHLLQASPDEFRIIQETILKAGSILWISGSIGPDAALVTGLARTVRNEVPGSEIRVLQINNTPLDSVSAWSKPILRLLQSTTADTEFTLEGGVFHITRIVEDRTRNEDLAIALGRQEPKLTQTSLSEIPGPVKLSIKNPGMLDSLYFEPDYTPETDLPAGQIEVDVKASGVNFRDVMVCMGQIPDSLLGFEGAGIVRRVGDNITNLQVGDRVCFLAHGSHRTIHRVPGEYAVRIPDEMSFEEASGVLFVHGTAWYGLVKIAQIKAGQTILIHAAAGGVGQAAVMLAQHYGLEVYATVGSQDKKQLIQDLYNIPDDHIFNSRDLSFVKGVLRMTDGLGVDVILNSLSGEALRQTWHCIAPFGTFIEIGIKDILGNTRLDMRPFLQDARFAFFNFNRVEKERPKLMSEALKETMALISSGATKPVSPLKKFPISQVEEAFRLMQTGKHRGKLSLSYSPTDVVPFLGEAARPVRLNPSAAYVLVGGLGGLGRSLAQHFVQLGCKKLCFLSRSGGAGEKAQELLKNLQQQGVETLALPCDVSDSQSVTRAIEQCTTSLGPIRGVVQCAMLLRDGLFEKMSHQQWIESTRPKVQGSWNLHQSLPHVDFFIILSSFAGIFGSRGQSNYTAAGAYEDALASYRRSLGLKAITLDLGIMRDVGVLAEQGITDYLREWEEPCGIREVEFHALMDNVLAGELFGDQGSLPANIPTGLATEKTVQISGISKPFYFDDARFSILATAGALQDTTGSGDTSGSGKTASVQTQIAQVTSVAEAASVVTGALVARVAKSLQSSVSDIDPSRPLHVFGVDSLVAVEVVNWVFKEIKAKVTVFDILASVPITSLAEKVALKSSLLPQFT

SEQ ID NO: 224 - protein, 2050 aa, Artificial Sequence
  PKSC11B
MSSRQEISNQEQCLLLYGDQTVEKLPAIRALVQQSQRSEIGRRFLRDACDIVQQETFQLQIERAKITQFDTLLQLAENNARSEEPSEIVATVLMNVARLGELILYAEEDPQILGSADRPTHILGFCTGEMPAAVAATARSIPELYNLSVEVLRVICRFARNIIRRSVLIDRTNGNWATTIVGLPTEHVQAILDDFHQSQKIAPLRQICIGFISVGWLTLFGPPTTVEQLFSWSRELDEASRIKTDAGGGVHMSNLPELDLDEVVGSSSVLEVPINPNAKFWSPYNCEIRSAPTLRDMLHQVVSGIAQDAIRLSETIDLVVKSLNHSPVKIVSVGYTHHLATLQKSLQRAKIPFTVMQHSNSPEDLSGPLVRGGSDLIAIVGMSGRFPGSENVQDYWKSLLDGERYIRDIPPERFNLDKWFDATGKQKNATVNRTGAFLDRPGYFDNRLFNMSPREAIQTDPLHRLFLTVSYEALEMAGYSPDATLSTNSNRIATYFGQTSDDWRDILLTQGVDIYYASGICRAFAPGRLNYHFKWGGPSYSIDAACASSVATISLACSALMARECDTALAGGGSILDSPAPFAGLSRGGFLSPERGCETFHEDADGYVRGEGVGVVVLKRLEDAIADNDNILSVIRGSARNYNKGASSITHPSAEDQQRLYQQVLSNSAVDPSSVAYVEMHGTGTQAGDSTEMSSVLSAFGHGRSKENPLVLGAVKASIGHGEAAAGVCALIKVLMMLQQRTIPPQPGMPFQMNHRFPDLGRMNVHIPSGAMPLYSADKNSKLRVFLNSFDASGGNSCLLLEEAPLKPVKGVDPRKHHVVSFSARSPYSLRGIKERYLEYLYEHPGTSLVDLAYSTTARRMHHTSVRSVFTASSIEEFTKILEEDLSKPDPSVKKGKGSPPGRNVVFAFTGQGSQYAGMAHQLWNCSTVFRGLIESIQTMATAQGLPSFVDLIAQSDLDLSETSPVNTQLAIVAVEIALAQLWISWGVKPSLVIGHSLGEYAALCISGVLTISDTVYLVGQRALTLVQSAKQNEYAMLAINGDVDTARQYLSKGTYDTCEVACLNAPKSTVVSGSLPEVKALKGELEAQGTRSTLLQVPFGFHSKQMDPILDSYESCAKGVAFSVPQIPIASTLLGDVVQDEFVISPVYLRRQTRESVNFVGAIGAAQAGGFIGNDTLFLEIGPDPVCISLIRSTLGAASVPRLLSSLRRNEDNWLTTSNSLATIYETGLYVNWPEYHREFSGCLSLLDLPTYAFDEKDFWMPYPDPDQPHAIEKTQLALPSIPAVPGFPTTTLQRVKQEAIDEGKISVTFESSTSEPHLLSAIVGHAVAGVTICSSSIFSDMALSAVRYAFERLHPGKWTDEFLTISSLNLHRPIVIANGQPSQTIEVNVKLESNTEKAQITFSSQAGDATHSVGSAKVSLRDAGNWQQNISRSLFLIRSRIDALKEAKNTTKGQRLLRPVVYRLFSNVVDYGELYQGLEEVFLDSELRDVVGQIKLPTLPSGESSGTYLYSPYLLDAIVHVAGFLANCGLRYPEDVAFLASSFEAWHILKPLSSQKAYTSYAHMEESADGNSLLGDVFVFEDNVLVTALIGVRFQKMKKMALTKILQSAAPGSTVQKGTGSQYVGEAEFESPSSSADPSTFTTPRATSVATSVTSVDEDTGIIDKFLTAVATEVGCEVSELEPDTVFADLGVDSLMAITVIASIRNETGVELPGSFFLDHQTVAEAMKELKGGGDSGVATPQFTPPDASPKVGTEPVENSVAESTIPPQPLENQNPPASESKAKPEEAPARPVSLTTKPAPALLLQGSMSSTEAPLFLLADGTGSVSSYIQLPALPGGRRIYGIESPFARDPSALVDVSVEQLVGVFVSSIRKIQPTGPYSIGGYSIGAIYAFEVSRRLLEASEAISELLLIANPAPIAAPTKLRGREITYGTLQEGGFAYANSRTKVAISGRQKQHLAAAVQALLQYEPKSLPQESRPGHLTLIIPSKGLGDAASTAETPFTAWLHANWDSSKNLGWESLVGSIDTVHKQETDCFSLLKYPEVSFHL

SEQ ID NO: 225 - protein, 398 aa, Artificial Sequence
  PKSC11C
MSSSVTFDSMWAECLRVIANETGFGVDDIDDDDDFTTDLGVNPIVLRSMVRCLKVILKQDIPSAVFTQYPTIKEFREGYLQACFESEKSRPQSQHSDKFPALVVGKNPKNTPNKTKSRIPVSMVLQGKPATDESTTNIFLLPDGSGSGMAYAAMPHIYPYSVCLIAMNSPYLNSATEYRCSINEIARQYVKEIRQRQPHGPYIIGGWSAGGYYSTEVVRELARQGERVRKLILLDSPCRPDFEDLPMEVVEYLSRNNLMGNWGSNSRIDNVPQWVLAHFRSTLRAVREYIPEPVDSTDGPEEVCIIWSRDGVLPIQELEKTGLDLSVRVSRFLLEGKPDLTRAYGWDRLFPESRFSISSMPGNHFSLINKPNINELAVLLRDVVTEPSQRQRSWYSFQ

SEQ ID NO: 226 - protein, 2366 aa, Artificial Sequence
  PKSC12A
MSSPLMISPEPTGDDIAVIGLACRFPGEASGPQEFWDLLRKGRSAYSSASKRWNVDAFHHSKRGRLGTSVAGGGHFLEQDLAAFDAAFFNISQNEASSMDPQQRLTLEVSYEAFENAGVPIDKLSNSQTGCYMGGFTSDWREAMTRDAEAAPMYTGTGVGSEFISNRVSWFFNMKGPSFTLNTACSSSLVAFHLACQSLRTRESTMAIAGGVSVHLNPDFFMYLSNQGFLSQEGRSKTFDASGDGYGRGEGCGVVVLKRVEDAIRDGDNIRAIVRGTGVNQDGKTKGITLPNAVAQAELIRSTYASAGLDLGDTQYFEAHGTGTQAGDPTELEAVSLTIGAALAADKKILVGSVKPNIGHVEASAGIAGVIKGVLALENGLIPPNILFNTPNPKIQFEKWRVQVPTALTPWPSDGVRRMSVNSFGAGGTNAHAVLDGAEHYLRERGYQLTGIQGIKPGSERATNGPRLFAISSHDQDGLARQRESLAKFIQSQVANIPSMKQDVYLNRLAYTLSERRSALPWKSFAIAANIEQLVEELRASVPPSGRSKDGPRLGFVFTGQGAQWARMGMELRQYDIFQSSLESAEAFFKNELNCPWSVIEEMEREEGDSRINLPEFSQALCTVLQVAIVELLSSWGITPVAVAGHSSGEIGAAYCLGALTREDAWSAAYWRGVLSSQIPTLNPNLKGSMIAVGLSEGDAEQYIARVSKGSVTVACVNSPSSVTVSGDTTGVDELQELLRQDGVFERKLKVGVAYHSSHMQTIAAQYLEAISGINTAESHPERTMHSSVSGDLVEADELGPMYWVRNLTNPVRFSDALGSLVLPIDESGEQVKTAAVDILVEIGPHSALGGPVKQILREIEVKDVEYQSILSRGKSAVQTALGCIGTLSLRGVPVEIKEVNQYHASGSTLTPLHDLPAYAWNHTRTFWAEPRVNREYRFREHPRYSLVGAPLPRMSENERDWKGLLRISEEPWIRDHRIQNLVLYPAAGYIAMAIEGARQLADKSREISAFKLRDIQIGAAATVTDDADVEIMLHMRPHANGTRDKAFSWWEFSISTCAAGQELRQNCAGLMLVEYKSDEGSAMSIENEIAAIAATEQYADIKSSCITQEEPAKFYEDLASLGLNYGPTFSLVTEIRLGNGVSCCTVEVAVHGSTVVPPASVKRPYIIHPTTLDAMFHAVFAALKGPSGVLKGAMVPKSIDQITIAADIDIAEKSVFHGFATASKHGFKEIMSDVHMFDSSLRNHSVSITGFCCADVAGSVEMTDAAADAVNLCTSNTWLPAIELLSSEQLQKVVEDLAANANTSGLSTIIKLIAQTKPESSVVEFGQTGLPLLSGISASHIGSPLNYMLASADGEWLKEAEGNLKDSGLSPQFTLLDEKKELSGSGFDIAMSDFTPGDSTDLNTILERFGSIVKPGAKVLFVDNLPTGSVDRDSVLLKHGFHLDFSTAAGQTNLTVASVPVTNGNGIVTDEIIILEPAVPSLTADAVATQVTAQLDAASIPSKRITLQAPLAELKGKRCISLIEVESSFLEDLSESGFESLKSILLETSSLVWFVGVDGPAASLIAGLARTARNEIAGLQLSTLQAPPGSFGSYENLASSIVKVITSPIRDNELRIENGILQVSRLLEDHGLSGAIDGLQRGEKVLTPLSQTVRPQKLVVQNPGLLDSLCFELDESLEGPIADGEVEIEVRASGVNFRDVMTAMGQIPDESVGLEASGVVRNIGKDVTRFQIGDRVCCLAHAAHKPLIRVPVVQCQRIPEHLSFEEGATLPMVHYTAYHALVNLARIRKGQTVLIHAAAGGVGQAAIQIAQHFGAEVFATVGSDAKRTLIKDLYGIQNDHIFNSRDISFVKGLLRMTKGRGVDCVLNSLSGEMLRQTWYCLAPFGVFVEIGMKDILSNTGLDMLPFKKHATFCFFNLENIATINPKLIEEIGLGVFGLLEQGFLKPVAPVTAYPVSQMESAFRLMQAGRHQGKLVLSYSPEDVVPMLRRADDALRLNPDATYVLIGGFGGLGRSLLRMFAASGARHLAVFSRSGVASAAAKACVAELEQLGTRVQVYQCDVSSPSAVKDAVEHIEENLPPIKGVIQGAMVLRDVLFEQMSYQQWIESTRPKVQGTWNLHQFLPNDMDFFITLSSFAGVFGNQGQGNYAAAGAYEDALAYYRRSQGLKAVTIDLGVMRDSGVLAEQGTTANLKDFEPFAISDVTFHAMIKKVIVDEVSGLSTPAQIITGMPTGKTVQAAGISRPYFFDDARFSTLSLAGEQGEEGAGGEVSIETQISGLASHEEAVPLVQEALINRVAKFLQTSPSEIDASKPLYHYGVDSLAAVEMRNWVFREIKSDISLLEVMSASPISKLSQDIAFRSKAIAA

SEQ ID NO: 227 - protein, 2062 aa, Artificial Sequence
  PKSC12B
MSSSTQHFLLFGDQTVDLVPSLHRLLSISQSSQTVRRFLQSTLDVVQANISALGSDERVRIGHFGSFEDLLQRYSGTEDTIGVIHTVVICACRLAELILLVENDPSLLGSSSKVTALGLCTGLLPAAALAGSQNITELIAIGTETIAVCFRLALELYRRTRRIEETPGHWAHTVLGVPAREMDVILKEFHASMNVPTHRQVFIGVEDESWLTLFGPPPELAQLFSYSTKIESAPKLQLAAYGAVHSPHLPIPDLDAVVGNSPILSRSITSQVQVLCTTTGIPYSATTLRDLYLSVCREIVHSRLKIGTVLRAAAQGLQTRSPVLLNVIGLTQATPIVKRVLDSHRLSVTLHDKPVGLSEQSEDLRDGSNTIAIVGMAGRFPGSENLEEFWKSLMDGLDAHQEIPSDRFDIEAYYDPSGRSKNSLSTRYGCFLRNPGDFDHRLFNVSPREAEQMSPLQRLLLMSSYEALEMSGYTSNGTISTQSQRIATYFGQAADDWKDGSRIAGIDLYYVPGLQRGFTPGRLNYHYKWEGASYSVDSACASSASAIGLACSALLTRECDTALAGGVNSITSPEPYSGLSKGSFLSPTGGCKTFQDGADGYCRGEAVGVLVLKRLEDAIHDNDNVLAVIRGSGRNHSALASSITHPHAETQVRLYHDVLQKAGVQAEEVGFVEMHGTGTQAGDAVEMSSVLEVFGRNRTKTNPLIVGAVKANVGHTEAAAGAVSMIKAIMALQKGIIPPQPGVPFKINHNYPPLKELNVRIADDKINFHKPSGGNGKRKVMINNFDAAGGNSCFIIEEAPQAKPKQKDPRSHHTVTVSARTSLSLKKNKEALLEYLTCHAETSLADLAYSTTARRIHEELRVAYSGDSIESIVQQLRGDLSNAASSATAAPRGPQKKSLVWVFSGQGSQYPGMGSELFHSNATFRNSIRSMQRMCDAQGLPSFEELISNKDVDVAQKTTIQVQLAVVAIELALADLWRSWGVKPDVVIGHSLGEYAALCVSGVLSVNDALYLVGQRALLIQNRCSENTYAMLAVVAPAQALEEYLRRPEYQSCCISCFNSPSATVVSGPVSNLQNLEKAIRAAGSICTLVRVPYGFHSPQMDSILEDFEHLSHSVRFQTPKIPIVSTVTGSIVCDSGSITPRYLARHAREPVEFNKALAACRVEGVADAHTIWLELGPDSVCGSMVKATLGAMNVYGSIKSKEPNWKTISVTVAALYTAGSSLNWCDFHHEYTKSLTLLDLPKYAFDTKNFWRIYKEDPVSQAENVVTKATTMRHISSSLHTVKEQVITTDKISIVFETSLADQDLYEAIRGHLVDELPLCPSGIFCDIALTAAKYVHSKVHKNEASQKNLVINNLELNHPVVVASSDSQQTLRISADREARTGHQVKITFHLQDGSSTQEIGGCQVNTYTPQEWENDWSNTSFFVKSRMSSLVESVKAGRGDHLRRSVIYKLFASLVKYDQKYQAIEEMFWDEQSNDAVANISLKPYNGRGAFEYLPYWTDPLVHLAGFVLNVDLTSTSDDVWLSSGVARMQVHKELSAETPYVSYVRSHTPDEHGTAIGDVYVFDQNRLVGFCSLVFQRMPRIVLHRLLHKHEPRAPTKASGSTQAVFVQKVQKSVTDKHELPATMSQSTPVSIENNLANRLIAIIAEETGADMVDMVPAADFASMGVDSLMGITIIDRVQKELDVQLEASFFQENLTVADAQRALGYDETDSENDQTPNADSDGSTPNGILTPISPPESDIEEILVAPNKLLSEAIQIATEAPPAEVITAPAGVEITPPSTSPSTEYKSNVVLIHGRKKSGKTPLFLITDGAGSATAYIHLPRFASGMPLYAVESPFVRCPLEYNFSVEETAKMYIAAIKKVQPEGPYMLGGWSAGGAHAFEVSRQLLEAGDKIQRLIIIDMKIPKPMPEGLEVTMDFLDKVGLTTGINRAGPALAGMSERLKQHLASTIKSLMVYTAREMDPSRRPEKSYIIWAEYGLAEIIGDAAFKDVADMMGLKEDVEGNPMEDDTGLASWFYSKRDSFGPNGWDKLLGNVVCRSMKADHFSMVTPPAVSLQVPI

SEQ ID NO: 228 - protein, 412 aa, Artificial Sequence
  PKSC12C
MSSASINLVDHVLEIIVSETGVSPDELYNDVYFADLGLDDILSKLIIDRIAEVTAVNLGPNVFQTCDTVGSLKQHLAQIASRTTSGKKNTMPKLISTRPQTNKDSDFRQEKPSSLAIRLQGDPQKAQHTIFLLPDGSGTGMAYARIPLLGPEICLYGLNSPFLSSLEGATAWFNCSLEYLAQLWIPAIRSVQHRGPYILGGWSAGGYYAFEVAKQLIYQGDMVSKLVLIDSPCRLIFEALPMEVVSYLSSRNLMGNWGGSNRGTPEWLIKHFDATIKSVGNYTPTPLESSAQTNMPEVYILWATDGVLTDGGVERSGLDMSVKVTRFLLDRPPDFGPLGWEELFPGMRLKIARIPGNHFTIVHDPYVSTVNLIRITPWFLRLYILIGGAKLVMRITKMNGNITTIDVKIDGN

SEQ ID NO: 229 - protein, 2388 aa, Artificial Sequence
  PKSC13A
MSSDPQHRLMTEVAYEAVESAGLPLEKLQGSKTGVWMGHFTSDYKEMLYRDPDGAPPYAATGLQKTSLANRISWLWDLRGPSFTLDTACSSSLVALHLACQSLRTGECDMAIVGGSNLMLGPDVFIFFGGQGFLSPDGKSKSFDISADGYGRGEGFAAVVLKRADDAILDGDPVRAVIRGTACNQDGHTKGFTLPSSEAQTSLIKEVYALAGLDFQRTGYVEAHGTGTQAGDTEETLALSQTLSASHSAANKLLVGSVKSNIGHLEAAAGLAAVIKSVLVLEHGMIPPNIHLKTPNPKIPFDDWNLKVPTTLTPFPTGKVKDGLRRISVNSFGYGGTNAHAILDDAASYLTTRAVADGLHFTKLVGGRHELPGRRNTPKSVVGELASPKRLFPITSQDRNGLARAKKALSLYLKSSGFESWSDEKQANFLQDVAFTLSKKRSLFQWKTYAIASSSSIQDLVQVLDKKDAAVAETLSSRTPRLGFVFTGQGAQWPAMGMELFKAYATFRTSVEAADAYLRDELGCEWSAIQELSETAKEKSKIAIAAYSQPLCTVLQVALVDLLKEWNIRPHSVTGHSSGEIAAAYCMGALSRESAWKAAFFRGTLATALKETAPDIQGAMMALGLGPDAAAAMILRAKADGQVSVACINSPSSVTISGDVDGVDKVLAKSEEEGVFGRKLQVDTAYHSHHMQMVSQDYMESIYDLEVEPTASKSTVRMHTSVTGSAVETPEDLGPAHWVKNLFAAAIQDLVRPLATESSKRRRENAVDILLEIGPHSALQGPSLQSLKAIGVSNIPYFSVLSRNQNGVDTALGLAGTLFSHGYPVNLAFNYQNIISGRTPRTLVHLPSYQWNHTQKYWAESRVAREFRLRDYGARSLIGAPCPVKSTQEHLWRGFLRLDEQPWVRDHKINGSILYPGAGFLAMAVEGARQLAFQQDLNKQRPIAGFRLRDVQLVAAMLPQSEDGWYRFTVASSVDGQPLTRNCTGLVLVEYEDTQAADSGMPLEEQEIVDSFRAAVSSCDNPVDASQFYKKLEGIGFQYGPCFANVTALSSCTNTAVGCIAVPDVGFTASDTEVGPKDLYHNRPHIVHPTFLDAVFHLGFAALMGNGKDMTSAMVPTQIDEIFLSTNLPVASGTHLKGFCRAKKAGLKTFKAEMAIMDEQESKLGLTIKGFYCSQVEGSPSKASGSAGTAVTKKYASQMVWRPHLGLLSSHDLKQWIQRKTKSVDEVVAEYIKLLHHINPSMSVLEFTPAEMPKLLIASLVSLGMEAVLNTAHYTVYSMNNAAADEVKTLLLQSLPVGFSDLVNVAVLDFFSSSSAATFDSTVSRAADLIMASNLSKIETGNVKSALETSMSRLTAKGRLLLIEDDAENAFKVIETAKQLGLTVEAKLEAVTGVVLVFSTSDEASRQQSNSEITIGKPVTVLVPPNASETATSFFDTLSTGLVSAGFFPSLVTWDPAEALALQGKTIISMIELEAPFWQDLVTAPDSSGESAFTAARDFVLSAEHVFWVTGFNDPAAEMVSGIARVVRNEVPGLSFRTLNVYDSLSAYAAQLVAQTFAGFELKSLDDTEFKLEDGVVQVNRLVVDGVINDEMDKLVNAGTAAAKRPTGKIALGSVDATSSLRLAIEVAGDLDSLHFIEQQAPTEHGAGLELAEDEVEISIKASRVSQIDLATVKGQTRSDPSALGMEASGVVTRIGSKDGTRKFNQGDRVMVMAPGAHGTLLRTKADYVGILPDDMSFEEAASIPIALATAWYALVHLARLNSSKDSLIPKTLLIHDALSTVGQQALHLAKHLGLVVIATVDSYSQADILANSYGVEPSNIVTISSTNVFSLAKVIKKLTPRGRGVDVAIDCSDTLAGERLRQTVDSLASFGHFIRCVVGGFATATLAGIPASNLSANTTISTVDIPSLIQSRPDLLTEILLSAFRFLHEGKNQFLGPVRCFSAGSVGAAFRQVESNPQETTILTYSANDIVPAKVVVRPLDPSTSSSLRVTLDSEAIYVLCGGLGGLGRSLSTLLINQLGARKLLFLSRSGAAAPSARQLLADLETSAAQPRVAAYSCDVSDRISLERAIARAEIELEGKVKGVIQCAMVLRDVLWSNMSYNQWVESTLPKVQGTSNLSAVLPDVDFFVSLSSFAGVFGNRGQANYAAGNCYQDALARYRRRTLGLKAGFTIDVPIMRGIGVLAETGMLDSLRDWEIPYGIGEAEFHHIMQLAIRREMNLEPDQSSYQMILGIATGASAREAGIPTPFYLKDESKFSIMDRTDLRYLKGFSEDSVAPSDQAGEQQESIQMVLARVTDLDEASEAITQALVSRVAKMQQVALEEIDPSRFLHSYGVDSLVAIEIVNWALKEIKSKINVFDVMAGIPITALAENIARKSDLIPKEVRED

SEQ ID NO: 230 - protein, 1621 aa, Artificial Sequence
  PKSC13B
MSSAASPAKGPSAAFFCPVPFLVDKNYLTQLRRRIVGSSFLKPLADAIQETPEIWKQLSGDPRAQHVAFGPRGEDFARAFGEWIATGETGLIASQPSTVVSFPLLILTGLCQWCSYLELSGQTQAEVLAALGSGGVQGYCGGMLSTIAVASSATEEELGHRAANFYRAAFLLGVFMSEGEVGPPENSPDMLIVRLKHPGQDLQLMEQFPGIYASATTNPVTICFAGRKSELAPLKEYVASNSMFSIQTYPTGTGHDPRNARYLDDMLAIVAENKSFHLPGADALKVPVQSNWDGELLLKETPAELARNVLGNVLCGRCEWYTVVEKVAKRIRETSEESTASLKIAKIDLVLTLRELQQTRSELSSYNDDAVVVVGTACRLPGANNLDELWQVLEKGISKCEELRPDRVPLSRSHRASLDPKFTGGRKWFGNFVDDVDQFDNELFGLSHSEAAWMDPQQRILLELAYEALDSYGHLGHRSYSREAAHDVACFIGGTLIEYNEHTSTHGPTAYSAIGTMQAFQCGRISHHFGWYGPSETIDTACSSSLVAISRAVAALKAGDCSMAVAGGANILGGVNYYLDLAKARFLSPTGQCKPFDVTADGYCRADGAGLVVLKRLKDAISSGDEILAVIPAAGTNQGGLSKSITQPDGKAQRKLYKRIVQSAGLTPKDISYIECHGTGTQAGDPNEIGALRDVFGDSDREKKLFVGSVKGNIGHAEAAAGVTGLMKVLAMLREAKVPPQACFDKLNPAIGPLESFNMLIPSGAAQPWDASGNVRRALVNSYGAAGSNASLVVCQSPSRRPKSAWWLDQRKRDKDGVTATWPLLVTAATKASLAANCRALADMVRSDKPDISRLLWTLSEKRQRHRFRAVLSVPNNEVPDALAAALEQAASLPAQAPPKYKHVVMVFGGQSQRSVHLDRHLYESCPQLQLHLSECDAILKELGYPPVVDDILNQDKVEQDVLLLQTGTFAIQYSCAKTWEDAGLHVEAVVGHSFGELTALAFSGALSLRDGIRVVAERASLMQTAWGVEKGKMLAVHAPLETVKAVAKAVDGLEIACHNSAASHVVVGTSRQIEQAEAVVAAQFKGIRCQQVDVTHGFHSKFVDDLLPGLQKLDESLTFQKPRMRLELCLPERHDAEPLQGHIARHARNPVFFEDAVARLAEDLGPSVWLEAGTDSPIIPMAKRAVADAGTHSFHPINFKSARKPETVICDITISLWRAGVDTTYWPWVGATGIEAVRLPVYQFSRNSFWTQWVDHPAELQTRLDEALSHQKEQLTLQATTPQSLKLVSLSQTHSNRFHVNVNSSRFQQLVRGHTVCEQPMCPASMYMECVAAAIEIYELNEKRTFPSPGVALQFGGLAFNHPLTLSPGLQVSVVLDIEHGNGRSWTFSIESTRGKKSDRPTVHVRGLVAVVPSPDMRHVKALLGDRITQLKAHPEAETILSRRVYTLFGTVVDYSSVLRGIESLTLHGNWAVGTVKYPKQLVALHETESSVLDLADAAIADNFVQVLGLAINTSEHVSPGSAFLVSSIDSFTFSSGCHLLNNPGSWTVTTHYNAEKNAKTITGDIYVTDENGDVVASVLGVRFSLVQLGALRRVLDAAAGGRTLNRRRILLMRLAHFLF

SEQ ID NO: 231 - protein, 366 aa, Artificial Sequence
  PKSC13C
MSSAAHIAKVLGVIAQEVQEPPEELQNNSDLEFADLGIDKLLSGSILGQIRKTTGLELPSDLFESCPTVGSLTEFLENIDHHSTSGSTSSHKSAAVSPGPQASSAATIADQPLSIRLQGSPKTPRKTVFLLPDGSGSAMSYARIPSLGPGICLYGLNSPFLLEPEKFLPIPDIAPIWAAEVRRLQPKGPYILGGWSAGGYYCFEVAKYLMNNEKEDDGRPVAIEKLILIDSPCRTIFEALPMVVVNTLSSQGLMGNWGTKEAPKWLLDHFDATIARVEEYRPSPLTIASQQQVLPKVFILWATNGVYASGEAAASGLDMNSKVTKFMLEDRIDFGPNGWDILFPRGTQIALATTPGTHFTLIFPRT

SEQ ID NO: 232 - protein, 2586 aa, Artificial Sequence
  PKSC14A
MSSPFLSDSPPLSPGGSSSASSTAASSTLHQTHAQSNDPIAIVGISLRGPGDGADTERFWQMLLDGRSARRDIPKDRYNVDGFYHPDGDRLGSIQQRQAHFLEQDFKVFDAPFFSVTPKEAKAMDPTHRMLLEATYEGFENAGMRLEDVAGTKTSVYVGTFTADFPSLQARDNAGPSIYHATGTSASLASNRLSWFYDLKGPSLTVDTACSSSLTAFHLGCQSLRTGEASMSVIAGANLMFGPDMSILLGAAKILSPEGRSKMWDASADGFARGEGIGVLVLKPLSAALRDGDTVRAVVLASATNEDGYTPGISLPNSEAQQELIRDAYAMAGVDPADTGYVEAHGTGTQAGDPLEARAIIRTIGAAGRRRADLYVGSVKTNIGHLEGAAGVAGVIKAALAVERGLIPRNLWFDKLNSQIKLPSNVKIPVETTVWPSSGPRRASVNSFGFGGANAHVILEDAASYFARTGQSGRHFTAGAAKALLSEQYSDSDVSSGSDSETSCNNGNGNSNSKSNSKTTSKTSTPKILVVSSNDQDGVKRNVETIKSYLSSKPQTDLADLAYTLNSKRTTFPWKSFAIARDLESAPDGLDTMPAAVRSSNASVPRVAFAFTGQGAQWHAMGRGLSVYKTWRDSMAVSQQVLTSLGCPWSLGEELSRGEKDTRLRLTEYSQPICTALQIALVDLLRSWAVEPVAVVGHSSGEIAAAYTAGFLSHESAVKVAWLRGQVSGTVSRDGGMLAVNAPAEAMQARLGKLTTGRAVVACMNSPRACTISGDRAAVDELHELLKADEVVCTKLPMDVAYHSFHMEAAREQYEQALAGIPHLRPKSGPTMFSSVTGELVGADAMSPSYWVDNLVSPVNFTAASRSLLHHSPAKTRTDRSAFASVLVEIGPHSALRSYLLDVFKAEDRLTDLSYVGVLRRKMDAVDTALQAAGELWAKGCAIDVDRVNGTAPSEAKMLVDLPPYRWNHTKSFWEESHLSRQYRLRASPRTDLLGYRVPGVPDPTFRNFLRCTENPWIREHRVQGDVLYPGVGMVVMAVEAARAVADVNEEVLGYELRDVGISTALRVPDDEAGVEVMTQLHARRTGTKAEPSNALYEFAVSSWSDDAEQWTVHARGLVSLTYRSSLTPAMQGELERECQARGREFEVAKATCQRPARSFLYDQVEAIGMVYGPTFRNMTELYAGPDANSYGVIGIPDTKKIMPKGFEYPFVVHPATFDSVLHLLFPCIAGEEESLSEAVVPFSFDRIFISAKMPTEAGTKLQGHCSARKLSYTTWTSGITVCGEQLDEPLIIMEGLGLASIGGSGSEENAKESRAGCFGQNWHEDVDLLSPAQIKELVYHRTLKSKDDDTVLDKLEYVCLVYIARCLAWLETEEGRPHMPTSGFWKLYVEWMHDTVAAFPPLARDPAEVEAELQRCKEAIVHSPSGDITVQMVERIGVSLPAIFRREVEPLQVMTEGDLLYTFYRGAFGTSFNTNVAEYVGLIADKSPGLHILEIGAGTGGTTYHVLERLRNPDGTSKAARYFFSDISPGFLAKAADRFQTDASVMEFGTCNIENDPLTQGFAPESFDLIVCANVLHATKSIQETLTHCRALLKPGGRLVLSEVTIKRIFSGFIMGPLPGWWLGEDDGRHGGPLLDVPEWETALTKAGFSGVDMDVRGDREESLEPVSLIISTKPLTKRIAAADEFVVVTPALAESQKLAQAIVDTIKSAGKKCTSLAWEDVTKEAVQGQYCICLAEWESPILVDLTDENWARLRDVVLGSAGTVWVTGGAAMDTPEPLKSLMVGLARAIRNENAGVLLATLDLETAATIDMRQGCDAVLKVALEHSRGETPDGEFAARRGRVFVPRVERLPGVDASLRKYENKGDPEPVSFVGCGRPLKLTIKTPGLLDTFRWVEDETYHTPVPEDWVEIQVKAVGLNFKDVLVALGNLAEYKLGVDVSGVVTRVGAGVKDLKPGDKVMTASCDTFATFVRFPAKGAIPIPDDMTFEEAASMPLIFLTAYYALVTAGHLVAGERILIHAAAGGVGQAAIQIAQSIGAEIFATVGSDEKKQLIMDQYGIPADHIFSSRDTSFYKGVMRATDKQGVDVVLNSLAGEALRLSWHSLAKFGRFLEIGKADLFANTGLDMQPFLDNKSYIGVNLLDFENNPTPRAVALWRETAALIHDGGVRPVHPLQRFTMADVEKAFRYMQTGKHTGKVVVCVDEADVVPAIPRTPKVPIVADATYVVAGLGGICREIGRWLAEKGAKHLVFLSRTAASSAENKEFSAGLEKTYDTKIHAFDCDVGDKTALAGVLEAIGHLPKVRGCVTGAMVLHDTLFDSMTADHVRTTVGPKVHGTWNLHEQLPADLDFFVMLSSLAGVMGHRGQGNYGCGNIFQDYVAAHRRGLGRRATTVDIGYLLSVGFVAEHDEYVDHVKAMGLKVMRSSDLHGLLATAMEADLDASPAQVMCGLPYREHDDAWYWIRDGRFAALRNVGAAGAAAGSGGGISLREELARCGPGDDEAAVDLITRALVQRLAKLMMMPEADIDAGRPLSAYGVDSLVAVEVRNWVSKEVVVEVSVFDLMANVPMRVLAANLAKKSALLSDKA

SEQ ID NO: 233 - protein, 2183 aa, Artificial Sequence
  PKSC14B
MSSLTTIKMADKLAFLLFGDQSLDTHGFLAEFYRHEDRGILAKAFLDQAAQALRKEIERLPRLERSRLPVFRTLQQLNERYHAQITKHSGLDGALLCVAQLAHYIDHAEKNHEDVTQHDKTYLVGLCSGLFAASAIASTPSLSSLVPVAVQTVLMAFRTGAHVAALAERLEPVSERSESWTYIVPGFTEEAAQKEIAGFHESHGIPQASQVYVSASSSANVAISGPPTTLKAFRAATSSLTKATAIPVYGPYHAPHLHRPEDVDNILGLNNPEMIDTFLNTKPRSSVMSCLTGTWFNESTTRALFAAVVSEILTQTLRFHNVLDGCLNLARGFDGKSCLIIPFGPTQHAATLANLLKAETNLDIILRKAPQISKESTDSVIGNHGRGSRDKLAIVGMAGRFPDAASHEKLWELLSKGLDVHRVVPADRFPVETHYDPNGKVINSSHTPYGCWIEKPGMFDPRFFNMSPREAFQTDPMQRMALTTAYEALEMSGYVPNRTPSTRLDRIGTFYGQTSDDWREINAAQEVDTYYITGGVRAFGPGRINYHLGFSGPSLNVDTACSSSAAAMNVACSSLWARDCDTAIVGGLSCMTNPDIFAGLSRGQFLSKKGPCATFDNNADGYCRGDSCASVIVKRLDDAIADHDRVLAVILGTATNHSADAISITHPHGPTQSLLSSAILDDAGVDPLDVDYVEMHGTGTQAGDGTEMVSVTNVFAPANRKRPADRPLYLGAVKANLGHGEAASGVTALCKVLLMLQKNAIPPHVGIKKGSVINKTFPKDLGERNVNIAFHLTPFKRSDGKPRRVFINNFSAAGGNTGLLLEDAPPVEPATQDPRNVHVITITGKSKSAMIHNAERLIQFMDDNDDTPISHVAYSTTARRIQHYWRMNVTAQDLGEAKQALKNRLQENFVPVSPEPPKVAFMFTGQGSHYAGLGKELYANHAVFRQAINEFDRISQIHGFPSFMPLVDGSEPDVAKLEPLIVQLGLCCFEMALAKLWASWGVKPAAVMGHSLGEYAALHIAGVLSASDTIYLVGARAKLLVEKCTAGTHAMLAVMGSVSTVQEALGERADSTNVACINGPRETVLSGEASEMAEIAQQLGAAGFKCTQLKVPFAFHSAQVDPILDDFEKLARSVRFNTPKVPVISPLLGKLVDDEPINPKYLRDHARDAVDFLGGLVSAQSAGAIDEKTVWLEVGPHPVCANMVKAAFGVSTVAVPTLRRNEATYKTLSASLCTLHTAGLNIDWNEYHNDFLSSVRHLDLPSYAFDEKNYWLQYEGDWCLSKNRIAKALPAAAAVAKPKLETTTVQKVVREEIKGDVAVVEIESNLSREDLRGVVSGHLVNGAPLCPSSLYGDMAITTCQYAYKLLRPESENIGVNVAHMEVPKTLIFDDAAESHILRLTVTANAAQNSADLVFHTGEGAKRVDHANCKVYFGNTEDWQGEFDRVSYLIKSRVDGLIDSEKDGKASKIGRGLAYKLFAALVDYTPRYRGMEEVVLDSETCEATAQVKFQTTEADGNYVFSPYWIDSLCHISGFIINGTDAVDSREQVFISHGWGSLRFSELPVASKKYRSYIRMQPIKGNKVYAGDVYVFDGEKIIGMCGDLKFQAIPRKVLNMMLPPRGAAAIAAPARAAPAPAAKPAAKEKKTSSTKEKSKSVTPKNIGKVNQKLASVVTQVLDILAKEVGVSHDELADNIAFTDLGVDSLMSLTVSGRIREDMDLSIDSHAFVDHPTIGAFKAFLAQFEGPGGAMEDSSSSSSSVSGDMDSESDVTTPADESDTASVKGEKMDGKATATDTNELQEAIRNTIATEMGMDVEEIIAAPDLASLGMDSLMSLQILGTLREKTGMDVPSDLFVSNPSLKDVERALGIVPAAPKRPAAQTAPAKSKASKSEKVKPCPPTTSIPPSQVTATIYKPPRPTEILDTMPHRKATSVLLHGSHKTATRHLFMVPDGSGCATSYTEMCNVGPNYAVWGLFSPFMKTPEEYNCGVYGMAAKFIEEMKRRQPVGPYSLAGWSAGGVIAFEIVNQLIKAGDEVENMIIIDAPCPVTIEPLPKSLHAWFASIGLLGDGDADKIPSWLLPHFAASVTALSNYTAEPIPKDKCPKVMAIWCEDGVCHLPTDPRPDPYPSGHALFLLDNRVDFGPNRWDEYLDGSKMTMRHMPGNHFSMMHGAMAKQLQGFMQEALQ

SEQ ID NO: 234 - protein, 402 aa, Artificial Sequence
  PKSC14C
MSSNLAADTWCNFVIQINFILGHNMRDYTGQVLSIIAREVDEPPEELQNNPELEFADLGIDKLLSRSIITQIHKATGLELPVELFETCPTAGALISFLKNKELAGPGNEAKPNDILLNQPLSIRIHGRPGASTKNIFLLPDGSGSAMSYARVPPLGPGVCLYGLNSPFLLEPDKFPRIEEISPIWVSEIRRLQPKGPYILGGWSAGGYYGFEVAKYMMRNEKEADGQPVVIEKLILIDSPCRVLFEALPMIVVTTLADQGLMGNMKDREAPKWMLDHFNATIARIEEYMPSPLILESASQVLPQTFIIWATDSIYSPGEASAMGLDTSVKVTNFMLEGRTDFGPNGWDQLFPKGTLLAVTTTPGTHFTLMTPPFSISIASRLKDIVLGNTKQDKRLWNHRMC

SEQ ID NO: 235 - protein, 2517 aa, Artificial Sequence
  PKSC15A
MSSQAPAPSRDDIAVVGLSCRFPGEADTAEHFWDFICNGRNAYSENPDRWTPDAFHYGEKKINTSLPRGGHFMKQDVAAFDANFFNLSKVEAESMDPQQRIIMEVTYESMESAGLRVDQLAGSRTGVFMASFTSDYREMLYRDAETAPLYTATGTSNTSTSNRVSWFFDLRGPSFTVNTACSSSLVACHLACQSLWSGETESAIVGGTSLLLNPDMFLYLSNQQFLAPDGQCKSFDESGDGYARGDGIGVVILKRVADALRDGDPIRAVIRGSGCNQDGHTKGFTIPSVDAQASLIAETYRNAGLSLAETRYVEAHGTGTQAGDTREMEGIARTFSQHRTASDELLVGSVKANIGHLEACAGLASLIKCVYILETGVIPPTPSVRVLNPKIRWEEWHLKVPATQTIWPTEGLRRISTQGFGYGGTNAHLILDDAAHYLEARKLRGHHYTRTHPQTQRLLTSAMHEDVSNDQPPRLFLFRANDREGLGRVRSSLAQHLEQLLKSWPQDSKDGGAYLHNLAFTLASRRSHLQWQTYATASTPSELLQALQHEGGAWAAPETRLAASPPRLGFIFTGQGAQWARMGVELMSYPVFRQSVEASDEFLRSALGCPWSAVDELAKPQATSRLSEAAYSQTLCTVLQIATVDLLEDWNVCPARVAGHSSGEIAAAYCLGALTKHDSLRVAYYRGILSSEMQQTHGDRRGAMMAVGASPEEVEAWLAKLTRGRVVVACINSPTSVTASGDAAGIDELLAMVQQAGVFGRKLQVDVAYHSHHMQSVSSAYAELLKDLAPLPARPGRTMHSSVLGRVIDAAELGASNWVQNLVSPVRFSEAVSSLLSAGDKPAVDVLVEIGPHAALKGPVQQILQAVGVSAVKYTSVLSRGQSAVKTALACAGELVLSSVPVAVSRVNLESGPPPSPLVDLPPYPWNRSTRFWAESRLSREYRLRKHARLPLLGSPCPTMGARERYWRGMVRLEEEPWIRDHEIQGSILYPGAGFLIMAIEAASQQAGEQRKVSAFRLRDVHLDAALVVSEDSTAEAILQLRPHLLAPGSSQSSWMEFTVNSSIDGGDLRQNCSGLIMIEYAADADSAMDRERALESDMVCDWYKKTYVSCQQSVDVGKFYSRLASLGLVYGPTFANVTEIRRTGQGQCIGAVRIPAVDSLVPPAYRSHPHVIHPGTLDAVFHLAFAALEDSLLPGPMVPTTIDELVVAADTPNTPGTLLRGVSRSSPHGFRELISDIDMLDDQSSRALVQIKGFRCADVSGGRMTSSEAASAESRPIGFRLEWKPAIDLLTGEQLRTHLDRRVKQEGASNVARATELNNHVHHLEETLPRVAVDPAMANLSDWLSAKSAKLTNGSASSSKRPSPGGDMLAMRDALTAVRAGSIPSPEQQDRMLREVEQNGALSILFKPLDAYIDLRHHAKPNLSILELSLDSVPYSVFAALPSRHKILQTAQYAIRVSQEGVADRVRAQFGPQASDIDVSVTDFTKKLDEGLGKHDVILIFDPGFVHAKLEVVLRNARKLLNPGGRIIVAEVSDPGLYLGTALGCLQWTRNLDVAQSSSSWTSCLARSGLTPALKLVDMDTESAVHGHFRLSLTGNAAESTNSDNRQPQQVTLIEAANASATAQGIAAAVAQNLDKASIPTKRVRWGSDVSQLKGQPCIVLTDLESALLKDPAPEDLAALQSLFAHAESTLWVSGPLGPDAALITGLSRSVCNEAADVHIRTLEVTDLPGPEADSYADLVTRVFQYSGPDTEFRWHSDALLVSRLVEDEARNKEIAQLLGQGEKAAVATTLQEKPEGLKLCMRQIGMLDSVCFEPDLLALEPLEAGEVEVDVKASGVNFRDVMVALGQIPDRAFGFEGAGIVRRVHASETRLRPGDRVVFLAHGAHRTVHRVRADYAMPMPDTMSFEEGAAILLVHTTAWYALVKSARATAGQSVLVHAAAGGVGQAVLMLARHLSLQVFATVGSEEKRKLVHETYGVPHDHIFNSRDASFAMGVKRMTKGRGVDIVVNSLAGEALRQTWHCLAPFGTFVELGMKDILDNARLDMKPFLQDATFVFFNLNRVQKERPDLMGEALRETMALVRSGALKPATPLTSYPASQVEAAFRKIQTGQHLGKLVLTFQAGDVVPVVRPDLSLSDSGTYLLVGGLGGLGRSLARLLVQLGARRLCFLSRSGAASSEARALVKELEMQHRVRVLVCKGDVSDADTVSRVVQQCRAALGPIRGVIQCAMVLRDGLFERMAHDQWTESTRPKVQGTWNLHEQIPVSDFFITLSSFAGVFGSRGQSNYAAAGAYEDAMAHHRESLGQRAITIDLGIMRDVGVLAENGITDYLREWEEPFGIREPEFHALIKSAIMSTTQPLTERSVVQIPTGLATARSAQAAGISTPFYFDDARFSILAQTRTSAGASSAAGSGDADAGKVSVRTQLSQAHSVAEAAAAVQTVLLERVARTLQSSVAEIDPSRPLHSYGVDSLVAVETVKWMFKTLDAKLTVFDVLSNVSITALCEKIASMSTLVKLN

SEQ ID NO: 236 - protein, 1717 aa, Artificial Sequence
  PKSC15B
MSSKLRVANFLLFGDQTVEKLPAIRHLVSHGASSPLVQRFLREVCDAVQLQVSKLPLHSEQRSNIGNFDSILRLAENNARLEEPNEIIATVLMNIARLGELILYAEQDPTVLASKGNRNCILGFCTGEVAAAVAAVAQDTNELVELGVEVTHIIFRMARELNRRSLMVDRTNGPWARTILGISVDRVREILQDFHENQSIPRARQVCIGFVSDGWLTLFGPPTTLQRLLEWSAELEDAPQIDTDARGGVHMETLPEVDPDRILGSSPWLDRAPVHTATIISPYTCKPRQQKTLRGLLEEIIADVGQRTLNLATSMNAALELAQADKIRLVMPGYTSHDVYFQKLLQKRGIEYSVMSHGDHLSSGPSRQGSGLVAVVGMSGRFPGSGDINAFWEGLLEGKRYIQEIPNTRFDLEQWYDATGKQKNSTMARTGAFLDKPGMFDNRLFDMSPREAMQTDVQHRLLMTTSYEALEMSGYYPDGTLSTNKDRVASFFGQTSDDWREVVVHQGVDIYFATGSCRAFGPGRLHHHFKWGGPSYSVDSACSSSIAAVGLACSALLGRECDMALAGGGSLLLSPSPFSGLSRGGFLSAHGGCQTFHDNADGYVRGEGVGVVVLKRLEDALDDQDNILGVVRGSGRNYSSDASSMMHPSANAQKKLYCDVLEQSGVDANSISYVEMHGTGTQAGDFMEMSSVLSTFAEKRGSDNPLIVGALKANIGHGEAAAGVCALIKTLMMLQSRQIPPQPDLPGPINHRFPDLAARNVYIAARNMRLEASPVAKGTLRVFLNSFDASGGNSCLLLEEAPPQAVKDADPRGHHVVTFSARSQKSLIGIKERYLAHLRQHPDTKLADLAYSTSARRIHGLLRYAIAASSIDEVVQCLETDLAQGKTPRQPPATPTVVFTFTGQGAHYVGMGANLWETSATFRNTLHDYQTMASAQGLPHFLHLITDSSTPAPQSGPDTVQVQLAMVSLELALAKLWRSWGIQPAMVLGHSLGEYAALCVAGVLSVSDTLYLVAKRAQIMAGALTPHEYGMLAVNLGVADTREVLSSGQHTSCAVACINAPKMTVVSGLRSKLDDLQDQLKSDGTRCTPLSVPYGFHSSQLDPILGQFEEACQGVTFSAPNVPVVSTLLATTVREEGTFSPEYLARQAREPVDFVGALGAVQEHKFPSLTFLEIGPDPVCSGLVNATLGADEAALRCVASMHRGKANWASISCSLRDLYTAGAAIDWPAHHRDFKSSVSLLDLPKYSFDEKEFWASFPDRDLQTIGDVETKQSQPPAIVPSVQGYCTTTLQRITRETIEPDGLSVTFSSDLADQHLRAAVRGHAVADVEICSSSLLLDMALSAAQYAYMKHSPGQKMPVPLTVRNCYFHRGVVLTDKAQTVEVTVTLTSSAKTADIRYHCRTPDEYYEVGACQVVLKPASKPDQAGFLVRSRMAALKASASHRLGRRAVYRLFDNVVRYSEQYQGLENVHLSEDMQDAVAEINMAHVPAAGGHYLHHPFLLDSIVHLSGFLVNNGLRYSSEWACLSTGFDEWHLLKPLDPTTVYTSYTFMEDSRSTSNLVTGDVYVYDGEELVSVLTGLQFQKMKRTALTHLLSPPTVGTMAAKPSTCIPTMAEKELLPAQARVAGLPVPTPPATASVDDGEGDKFDLVNTLFSIIAREVGVEPSDLEGDVNLANLGIDSLMAITIISVMQQETGVELPGTFFLDNATTTAVIAAVG

SEQ ID NO: 237 - protein, 377 aa, Artificial Sequence
  PKSC15C
MSSAVTVWQDALNIIAQESGLEPAEIIETDDTAFLTLGINQILATAILAHLRGPRGEPLPRDIFDQKPTVGAFRRFYETPIHLDIAPVAAPAPPKLKRVPSSSVPLSIVLQNNPASSRHTVFLLPDGSGSAMAYANLPPVHPAVCIVGMNSPYLRDAGSYRCSVEDLASQWVREVYRRQPRGPYIVGGWSAGGYYSYEVAKRLLQDGHAVAKLILIDSPCRTVFESLSMDVVNYLSSRNLMGNWGSPEMPEWLVQHFRSTLAAVGKYRPRPIDSPGNMQTYIIWSRDGVLDQDALARSGLDTSVKVSRFLLQGKDDLGPNGWDDLLPSKDMAIATQSGTHFTMINKPHVAQMSDLLRDAVIGIGSDRQAHWQRVSQS

SEQ ID NO: 238 - protein, 2387 aa, Artificial Sequence
  PKSC16A
MSSGSAKLTDSHSVAVTGLSCRFPGDGDSLDTFWESICAGKSAWSKIPKERFNVDAFWSPSKNRNTMTTQGAHFLKQDISKFDANFFSLPKNDVEATDPQHRIMIEVAYEALERAGLPLEKIAGTRTGVFMGHFTSDYKEMMYRDPDNAPVYGGTGSCTTSLSARMSWLWDLQGPCFTLDTACSSSLVALHLACQSLRTGESDIAIVGGTSLLLNPEMFMYLSNQSFLSPDGKCKSFDESANGYGRGEGFGCVILKRVDDAISAGDPIRAVIRGTGSNQDGHTKGLTLPNANAQASLIEDVYRSAGLGYEDTGYIEAHGTGTQAGDREESQALARTIASAHTSDNKLLVGSVKSNIGHLEAAAGIAGVIKAVLILETGLIPPSINFTKLNPKLNFDEWKLQVATELTPWPTSGVRRISTNSFGYGGTNAHSVIDDAASYLSSRGISATHHTQITHPEHASSVVGLNDGSSHGRASKDRSGPRLFVLSAQDKDGLKRVKDPLAKYVEMKGTELETESEQAEEFLAELAYTLSERRSRLQWKSYAIASSSDELSEVLGNDESPALVAQSSRQPRLGFVFTGQGAQWARMGMELMAYRVFRESVYAADAYLKEACECPWSAVEELEKGKSTSQLHLAEFSQALCTVLQVALVELLRAWNIQPNAVAGHSSGEIAAAYALGALTNEDAWKIAYYRGVLSTEMKANSPDVDGSMMAAGLSPEKAEEWISKVTAGELVVACINSPTSVTISGDTPGIEQLLALLQDEKIFARKLQVDTAYHSPHMQAVAQDYYELLADIVPQEPRADCTMHSSVIGSIIESKQLGAVNWVRNLVSPVKFSTAIYDMLRPVRADERATDNAVDLLIEIGPHAALQGPSTQSLKAHNIMNIPYQSVIVRNQNAVETALNLAGSLFAQGYRVNIQEVNADGDKHFAKPLVDVPTYPWKHSQRYYHDVRIEKEYLNRKTPKLSLIGAPVPAVGEREHLWRGHIRLSEESWIGDHKIQGAILYPAAGYLAMALEASFQTADVSKRISAYKLRDIQLTSAAIISDEADLECIVQLRPHIVATRDGSSTWTEFTVTTSPDGSSLVKNCSGLVYIEYESASDSEASKEKELEQQAQKDQYSRVKASCNNKINCAEFYSDLTTMGLEYGPAFSNVREARNGNGQSYGIVEIPDVAGRIPEGCDRPHIIHPGTLDAVFHLAFAAVMDENALTAMVPKSIDEVTISAHVPWTPGVKLPGFAKSEKHGFRELKADIVMFDGQEGLPTIDIQGFLCAEISGGSSGAAQNGPKPIASKLVWRPAVNLLSSEELREALSSHQGADRLVEYLKLAYHSNPALSILEVASQSSLLTRSDLSSLSKTAEITLACVDAEVTSKLEEASHDVAVESLNFAENLSADSLNGRNYDLIVVTDLDSFGAQAERAISNLTKVLKASGRLCILASDNVLAQIQPTFDAKVLQTTLFEDSKRSLALVKKSAPTNGTNGVNGHSESESVVLIQPFEPSEKNTSISREISKTLEGHGIETEIFVWGSDVAALAGKTCISLLELDSPFLEDLPEKCFQPVKTVILESASVFWITGFNAPSASMIDGLARVVRNETPGLRIRTLHADESSLASPRRFAEHFDRAFSSKSEDDEYLIKGDLLQISRIEEDTTFNDQINGLLPNAAKTITNMPLKEIPHAVKMVIQTPGMLDSVAMEIDDLAGTELEPNFIEVKVVASSINFRDVMVAMGQIPDSKLGFDNAGYVTRVGSAVTKFKVGDRACMYGHGAHRSIHRSREDYCALIPENMSFEEAATVPGIHGTAWNALVRLARVEKGQSILIHAAAGGVGQSAIQVAKHYEMEIFATVSSEVKRSLLRDEYGVPDDHIFNSRDLSFVKGIKRMTNGRGVDVVLNSLSGEALRQTWHCIAPFGYFVEIGLRDILANTGLDMRPFMQDATFSFFNLNHIEKSRPDVMAAIIEGSFDFFRRGISKPVKPLVSYPISDIEGAFRLMQAGKHVGKLVFTWGDDDIVPVIQQQKSSLKLDPTASYVLVGGLGGLGRSLSTKLVSLGARKLAFFSRSGTKSTAAKELVHDLEQQGVQVQAHVCDVADEQSVAASVAKTTQELGNIRGVFQCAMVLRDTLFTNMTHEQWLEATRPKVQGSFNLHKHLPSVDFFISLSSFAAVFGNRGQANYAAAGAYEDALAYHRRAEGKHATTLDLGIMRDIGVLAETGITDSLRDWEKPYGIRENEFHALMERAIDGDINGTSPAQIITGLATGGSALAAGIDTPFYLDNSRFSILSLTGTRDQSNSSGSSAPVHTLIAAATTLEEAQTAITDALVKQVAKMLQMPVAEIDTGRFLHSYGIDSLVAIEVVNWALKECKSGVTVFDVLAGVPITTLTGKMAAKSAVLKKELVPI

SEQ ID NO: 239 - protein, 2043 aa, Artificial Sequence
  PKSC16B
MSSASSTTIPRSPEASKPTNLVLFGDQTVEKKSSIQALVRHSKTSHAARRLLQEATDLVQLHFAQLSKEDKQWDHEVGSLLGLAEDNIAESKPNGAIATVLMCIGRLGELLVYAEEDPSILGSENDPVQVLAFCTGLLPAAALVAARDTSELFDLAREIIAITLRMTLEMHQRIIMIEDTNLSWATTLVGKTPEMVQPILDDFHKAKSIPYPKRIAVAVVSSGWLTLMGAPSSLGRLMEFSKELEDAPKMKTETNGAVHTEFMPTYDLDKVLGNSPLLDTPITSKARIHSPASCTPYSHTTLRSLLSEILPDIAHRILRIDDTSEACISDIVGQRPVTVTVAGPTGHLPAVEKVLKNKNIQYQIKQHRTPSTDSVSRGGSDMIAIVGMAARLPGSDTVEAFFETLLAEQIQIKKIPKSRFDLDTYYDPTGQRRHTTTTDQGAFLDRPGYFDNRLFTISAREAAQMDPLQRMLLTTSYEALEMAGYSKNATPATQDNRIAVYFGQAADDWRGVLNNDDDIDIYYVPSLSRAFGPSRLSYHHKWGGGTYALDAACATSTTAIHLACKALTSRECDTALAGGGSLCVSPTAFAGLTKSGMVSENGGCRTYHDDADGYARGEGIGIVVLKRLEDAIADNDNILGVIRGHARTYTSTSTSITHPSAECQARLYEEVLRQTSVVPNEIAYVEMHGTGTQAGDHEEITSVIRVLGQDRSKKNVLTVGAVKANVAHGEAVAGVTSLIKVLMMMKEKKIPSQPGLPFKLNRKFPKLDNVNVRIAGLGSKDLTLRPSPAASDGKIKCLVSSFDASGGNTSLVIEEASMRAKKTENPLPSHIVTLSARTAASLQQNRKRLLDYLMRNTQTKLADLAYSTTARRMHEVLRVAYTGKSTKEIINSLREDVSKNGSSDPKKKAASLNVVFTFTGQGSQYAGMGRQLYQHSAAFRTALSNYQQIAIHQGLPQFLHLISDDKTDIASASATQVQLAVVALEIATAKLLESWGIKPDVVVGHSLGEYAALCIAGVLSGSDALYLELIAGEYLMLAIGQDVDTTRQILAAQAPALSKTDIACINAPQVTVVSGPVTEIEQLKAHLETSGSRATILRTPYGFHSHHIDPILESFSEIALGVTFSAPTVPIASTLLGIMVEVGETARECVNYTGALDSYKAHAPIKSQSSFVEIGPEPMCVGLVRRTLDVPANRLLPTMKSSEDNWITMSHALASLYQAGANINWPRYHQAFKSSLTLLPLPTYAFDEKDFWKPFVERIHPTPSSQSATQKVAPSAPAFRTTSLQWIEEEALEDTSVSVTFASQTSEPHLYEAIQGHVVNNVTVMSLSIFCDMAKTAAQYAFQKLNPRSKVPYMSIYDVDMSHALVVPRSDPSQIVRTKVTLSSTSTTALIKFSSTKGSSNTEHGEFKVVFEDSASYFTQQSQTSFLISSRIDTLKEMSATGKAHRLLKPVIYKLFDSLVAYGKNYQAMEEVWVDSACRDAVGTIKLPNTSGSGTFQNNPFWTDAAVHLAGFLVNSGLKYPEDVVCLSTGFTSSRMIEELEQDEVYTTYVSMQDTETPNVLSGSAYVYNSAMKLVQVSTGIRFQKMKRIVLTSILGGAVTQKPTGLSLPPVEKTVAWQKDLIAVGDRVMTPRTGMSTPVTQMIDYNFSVAGDRSDVSTPATSVADVPSSSDQDLLKKMLAIVVAESGCSEGDLESTTSFADIGMDSLMAITILAMFQKSTGVELPPTFFLDHQTVAEARDALPGGDANGGIPTVTVSEAPAISQTQPEPEPIIEIEDNVPIPASPFTSDPIEPTKPSKAVLLHGTPTPTSSSLFLLPDASGSPSRYIQLPPLGPTTCVYGLESPFLKTPSEFRCSVPSLCLSFLNAIQEVQPCGPYLVGGFSVGALYAYEVARLLTEKGESVEKLVLVDMGVSKSIEGQVDVNLTTVTEAGLLPTVGRMTASQKEHFVSSIRALTSYNPTGIASGKQPKKTILVSSNTGLAAGKTSELAQWAQGSNGAGRGWSELLGTSVEEENVDAEHWTMFRHPTVSFPLWPRSASRLISV

SEQ ID NO: 240 - protein, 374 aa, Artificial Sequence
  PKSC16C
MSSTTMDKIFDIVAEEIGIERDELADDAEFAELGVDTFLAKCIVTRILKETKIILPTTAFTDYPTADDLQAYLATLPITPLVPIKIRGAPPCPASPAFVSSGPLSFVLQGKQQTCTKTLFLLPDGSGSGMAYARLPILDPSVCLIALNSPYLKAPTSTIFTVEGVAAQWAAEIQSRQPHGPYQLGGWSAGGYYSFEVAKCLMRKGERVEKLVLIDSPCRLDFEALPMEVVQYLSTNNLMGNWGNKHPPEWMVNHFDISIRAIQRYMPTPIRGNQVPDVCLIWAGEGVLKNGDRRPSPAEVDMGVKITKMLLERPTTVGAQGWDKLFPGKRLEVASMPGNHFTMVYPPNCASLSSLLADSVRDRKRDRRNRWTMV

SEQ ID NO: 241 - protein, 2386 aa, Artificial Sequence
  PKSC17A
MSSATAGNDGTSVAITGLSCRFPGDGDNPSNFWKLVSEGKSAWSMIPKERFNGDAFWAGGKKGHGSVTKSGHFLKHDVSHFDANFFNISALEANAMDPQHRLALEVVYEALESAGYSVKDLAGTRTGVFMGHFTSDYKELVISDTDGIPPYATTGLNKTSLANRISWTFDLRGPSFALDTACSSSLVAFHLACQSLRTGESDIAIVGGTNVLLNPDMFVAFSGQGFLSPDGKCKSFDASGDGYGRGEGVAAIVLKRVDDAIVALDPLRAIIRATGSNQDGHTKSLTLPSADAQEALIRDVYRLAKLDFDQTGYVEAHGTGTQAGDTTETLALSRTIAKGRSSKNKLVVGSVKANIGHLEAASGLAGVIKSVLMLEHGVIPPNIHFHNPNPKIDFENWNIQIPTQLMKWPSEGTRRISINSFGYGGTNAHAILDDAYSYLGGRGLRGLHYVSSGDHENREEEEEDDEYNSQPNTPRVYVLTAQDRAGLSRTKKSLSSYLRTKIDELQDDSQAENYLADLAYTLSDKRSRLQWKTFALASSLDELADALESADGGRIEVMSSSVPRLGFVFTGQGAQWATMGMALMAFPEFSASIEAADLFLKKTLRCPWSARAELSRGKGTSRLGLALYSQTLCTVLQVALVDLLRKWAVVPDAVVGHSSGEIGAAYCAGYLSREDAWRIAYCRGVVCSNMKTAAPDLEGAMMAVGASPDTCSAFIERVCPDKVNIACINSPSSVTLSGDAAAIISLQAALQEENIFARKLLVDTAYHSKHMKLVAEQYAKAIADIQPRANTTTGGDAACKMYSSVTESEITYKDLGPDYWVRNLVSPVKFATAIQNLMRPDADARSSGTDAVDILVEIGPHTALRGPATQSIQALGINNKPYLSAVVRNESAVETTLNLIGTLIAYGRPVELASLNGTATGKNKILVDLPSYPWNHAQQYWSESRLARGRKDRPVSASSLLGAPVPSFLEGERVWRGFLRLSEEPWMADHNIQDSVLYPGAGFLAMAIEAALQGADTTRKVKGLSLRDIEFLSAMLVPEDEELEHTITLRPHSSVTNSSEELWNEFVICSSPDRKSLVRNCRGLIRVCYDDSGAENLISEKEAQEDSGLLRYKQASSSCKEEQQPAEFYQTLTDLGYNYGLTFANITEVSVGDGQSRGSVTIPSVGLHDTQRPHVIHPATLDAMFHLAFAAANSNHLSKLTVPMVPKSMDEMYISTDIPYLAQTKLKGYSKARKLGSRRLLKATIGIVDEEEQRSVLEISGLHCTEIAQTSAAQKTAVLARKMCSKLVWRPSINFITNEDIQRIVSISTELSTQTSNYQQLSEFINIIHHTTPTMRIVELAQESSTFAQDKTLLEDVLQTANYTTLGYDGKTKSGPGVSSPAAEGVTLQADQDLFQEHARTADLVVCSAISSAPSNIANNARLLLKEDGRVCAIEAPEQVATTKSVLQEAGFTNFFQFGGSASGEPVFLVGSLESSENVAATGLKEKNLVLIQPANVDKSVTAVAEQLKTTLSALGYGTSIHTWGIDNVSALKNKDCVALLEAQSAVLESLVEKDFYAVQTLITQCKSLLWIDALDDARKGLINGLTRVVRNEIPGSQLQTLHVSSASLSQPKRLSHLICQVLGSKTSDNEFTVENDMIYTSRVVIDEELSAEIDEAQQAGADATSHVPLTSIDAPLSLTMTSTGTVCFKRDSVPTADLEGDEVEINVKASTISSNHLFADTDEPLIFEAAGVIVRVGSSVTKFQPGDSVVTYSLGLAGQTLQRTKADFCHLLPSGYTFTEAISGAAAHAAAWYALDRITRIQSGQSILIHAAAEDVGQAAIQIARNYNVEIYATIKEEGERELLCDAYDVPSDHVFNLQDSHAVDSIKQMTNGRGIDIILGSPRNAAHRQTSQCLAAFGTFVEIGLLDSSYSKVLDATFVPQDTTFSSFSLSNIARKSPQLMTQIIAAVFELHSKGITKPIASSKVFSASEVESAVQYAQTEGQDKTIILSWNDDDSVPLMGSGERQPIDLNLRNDACYILVGGLGGLGRSLAIMLAENGARKLCFLSRSGAASASANDLISDLEELGVQVRCLQCDVSEISALKNALDVCSAELGPVHGVIQCAMVLRDTLFTNMSYVQWQESTLPKVQGTQNLHNALPDVDFFVALSSFAGTFGNRGQSNYAAGCAYQDALALQRRDEGKKATTLDVGLMRDIGVLAENGMTDNLKEWEEPYGVREGELRNLVKLAIAGRLPAQVLTGLATGGSAVVAGIPPPFYLSDAKFSIMATTDLEKVSDSAGDSNNRRKSDSIRALISKSESLVEASGHITASLVSRIAKMLQIEAEDVDTSRALHSYGLDSLVAIEIVDWALKEIEARVSVFDIMAAVPITATASKIANASALCSKE

SEQ ID NO: 242 - protein, 1732 aa, Artificial Sequence
  PKSC17B
MSSTAITKRHLLLFGDQTVEKLTSIRALVRNAKTSPAAKRFLQEITDVIQIEFSTLSKSEHCWTGTFDTLLGLAEENDEQNGANTLVSTVLMCIGRLGELVVHAERDPTILGTPERPVEILGFCTGLLPAAVVVAAKDTSELHTLARDIVQVTFRMTREIVRQTKLVEDSSGDWARTYIGITREKMESILDDFHTSNSIPPTRQISVGVVSEKWTTIIGAPSSLARLSSWSSEIQSASHAKTDIGALIHSKVLPPLDLEKILAPFSWRDRVLDWTKARMISPASCTDYTNSSLGSLIGQIINDIASNALLIDETIQACISRLDKATSFGVIVPGPTGYLPAVEQAFRSSKIQYELNKETTDATGSGRGGSDMIAIIGMSGRFPGTNSPEEFWDDVLAANCHIESVPKSRWDLDVFFDPEDKSTRKNATTAMHGAWLESPGLFDNRLFNMSPREASQADPIHRLLLTTSYEALESAGYSPDGTISTESNRIASFFGQTSADWQDVLNQEGIDIYYIPGVGRAFASGRVNHHFKWGGTSLSVDAACATGIATVSLAVSALLARECDMALAGGGAVHVSPNTYSGLSKAGMVSTTGGCRTYHDDADGYVRGEGVGVVVLKRLEDAVAENDNILGVIRAAAQTYTSTSSSILHPSHVSQERIYREVLHQSGLQPQDIDYVEMHGTGTQAGDVEEMTSVINVLAKNHTKNEPLTVGAVKAVVGHGEAAAGVTSLIKALMMLRDGLIPAQPGWPFKVNRNFPSLSKANVRIATKTLDLKPSSKADKKAKILINSFGASGSNSCVIVEEPPEIPEKQEDPRGFHVVTLSARSAFSLKKNRENLIDYLERKPETRLVDLAYSTTARRMHETLRIAYVGNSVRDVVRQLRHDATNGGPNDPKSKTKKSPRLFLFTGQGSQYAGMGAELFAADKGFAELLGTYQDMATNLGLPEFVDIISNKEIDLTTKSPAQVQLAVVALEIAIAHTLKKWGVFPDAVLGHSLGEYAALAVSGALSVADALYLVGKRALLMEKHLEPHTYAMLVTSLSAEDLQQKIVELKLDSCGIACVNGPSVAVASGPANDLKKLEQHLLDASDIKSTFLKVPFGFHSAQVEPILEEFEKIANGVTFSNTHTTFVSSLTGTTESSVSPAYLSRQTRESVQFTKALEACEAAGLIGGNSLTMEIGPDPVCLSLVRRTLNIPASARLIPSLKSGQDNWSTISTALKAAYETGVNVNWPEFHKGFKNSVRLLDLPTYAFEYKDFWTPYRELEPVPTAPSPVVEKVQPPKYPGFTATSSVQRIESESIQGSKITVVYSSETSEPALLQAIQGHSVVGRTICPMVVYCDMAIAATKYAYWRLHDTKQTPDMSISDMEMARALVIEERGSRPVINIRNVYNQDQGFARVTFYSITPEGKEVAYGACKVKVAKGAAQKNSPQQLDFLLRSRMVTLQEYSKNRKAHAFLKPVVYRLFANVVGYGEAYQGLEEVVVDTRGSDGMGTVRLPQSDSTGHFTLDPYLNDAAIHLCGFLVNSGLNYPEDDVFICPGFQSWRFFEALHPGKAYSTYVYMQESASNDGSMSGNCYVLDGDRIVQELVGIKFHKMKRAVLQLSLTSTGAQPRNPPAETHRPKSPIPQQFSSIETTTISITEPQASDDSASAGTKTPEASDSEIIDTLLSIVAREIGVNVEEMLDETAFIDLGVDSLVAVTIFTTLEREVGLKLQASFFVEHTTVGDVKRALHEML

SEQ ID NO: 243 - protein, 375 aa, Artificial Sequence
  PKSC17C
MSSPDTAASPKEELLAVIAEELGMDIDDLSDDTDISHLQNDTALSRLILKRVPFSLQDDINRTTFQSCTDIGDLKAHIDQVMTLREPPKQSDKRKAKLPIVLLLRGNEATAKKKVFLLPDGSGSGMAYMSIPPIDPSICLYGINSPYLHSPEVFNGTIDDLAQIWTAEIQKVQPNGPYTLGGWSAGGYFSFEVSKLLISKGERVEKLILIDSPCRLLFEALPPQVVECLAKNNLMGNWSEGGTPKWLVNSFVSTIGAVEKYMPTPMVMPDGAKAPEVFIIWASEGVFPDGVEAYPELDMSVRVTRFLVNKRVQFGPLGWDRLFPAQDISIAKMPGSHFMIVHQPNVDTLGKLLGDVIQGLPAERKSHWTVWRNRS

SEQ ID NO: 244 - protein, 2386 aa, Artificial Sequence
  PKSC18A
MSSATAGNDGTSIAITGLSCRFPGDGDNPSNYWKLVSEGKSAWSMIPKERFNGDAFWAGGKKGHGSVTKSGHFLKHDVSHFDANFFNISALEANAMDPQHRLALEVVYEALESAGYSVKDLAGTRTGVFMGHFTSDYKELVISDTDGIPPYATTGLNKTSLANRISWTFDLRGPSFALDTACSSSLVAFHLACQSLRTGESDIAIVGGTNVLLNPDMFVAFSGQGFLSPDGKCKSFDASGDGYGRGEGVAAIVLKRVDDAIVALDPLRAIIRATGSNQDGHTKSLTLPSADAQEALIRDVYRLAKLDFDQTGYVEAHGTGTQAGDTTETLALSRTIAKGRSSKNKLVVGSVKANIGHLEAASGLAGVIKSVLMLEHGVIPPNIHFHNPNPKIDFENWNIQIPTQLMKWPSQGTRRISINSFGYGGTNAHAILDDAYSYLGGRSLRGLHYVSSEDHENREEEEGDDEYSSQPTTPRVYVLTAQDRAGLSRTKKSLSSYLRTKIDELHDDSQAEKYLADLAYTLSDKRSRLQWKTFALASSLDELADALESSDGGRIEVMSSSVPRLGFVFTGQGAQWATMGMALMALPEFSASIEAADLFLKKTLGCPWSARAELSRGKGTSRLGLALYSQTLCTVLQVALVDLLRKWAVVPDAVVGHSSGEIGAAYCAGYLSREDAWRIAYCRGVVCSNMKTAAPDLEGAMMAVGASPDTCSAFIERVCPDKVNIACINSPSSVTLSGDAAAIISLQAALQEENIFARKLLVDTAYHSKHMKLVAEQYAKAIADIRPRANTTTGGDAACKMYSSVTESEITYKDLGPDYWVRNLVSPVKFATAIQNLMRPDADARSSGTDAVDILVEIGPHTALRGPATQSIQALGVNNKPYLSAVVRNESAVETTLNLIGTLIAYGRPVELARVNGTVTGKNKVLVDLPSYPWNHAQQYWSESRLARGRKDRPVSASSLLGSPVPSFLEGERVWRGFLRLSEEPWVADHNIQDSVLYPGAGFLAMAIEAALQGADTAHNVKGLSLRDIEFLSAMLVPEDEELEHTITLRPHSSVTNSSEELWNEFVICSSPDRKSLVRNCRGLIRVCYDDSGAENLITKKEAQEDPGLLRYKQASSSCKEEQQPAEFYQTLTDLGYNYGLNFANITEVSVGDGQSCGSVTIPSVGLHDTQRPHVIHPATLDAIFHLAFAAANSNHLSKLAVPMVPKSMDEMYISTDIPYLAQTKLKGYSKARKLGSRRLLKATIGIVDEEEQQSVLEISGLHCTEIAQTSAAQKTAVLARKMCSKLVWRPSINFITNEDIQRIVSISTEPPTQVRNYQQLSEFINIIHHTTPTMRIVELAQESSIFAQDKTILKDVLQTANYTTLGYDGKTKSGLGNSSPAAEGVTLQADQDLFQENAKTADLVVCSAISSAPSNIANNARLLLKEDGRVCAIEAPEQLATAKSVLQEAGFTNFFQFGDSASGEPVFLVGSLGSGGNVAGAGLKEKDIVLIQPANANESVTAVAEQLKTTLSALGYGTSIHTWGIDNVSTLKNKDCVALLEARSAVLESLTEKDFYVVQTLITQCKSLLWIDALDDARKGLINGLTRVVRNEIPGSQLQTLHVSSATLSQPKHLSHLICQLLDSKTSDNEFTVENDMIYTSRVEIDEELSAEIDDAQHVGADATSLVPLTSIDAPLSLTMTSTGTVCFKRDSVPTADLEGDELEINVKASTISSNHLFADTDEPLIFEAAGVIVRVGSSVTKFQPGDSVVTYSLGLAGQTLQRTKADFCHRLPSGYTFSEAISGVAAHAAAWYALDRIARIQGGQSILIHAAAEDVGQAAIQIARNYNAEIYATIKEEAERELLCGTYDIPSDHIFNLQDSHTVDTIKHMTKSRGIDIILGSPKNAAHRQTSQCLAAFGTFVEIGLLDSSHSKVLDANFVPQDTTFSSFSLSNIARKSPQLMAQIIAAVFELHSKGITKPIASFKVFSASEVESAVQYAQTEGQDKTIILSWNDNDSVPLIGSGERQPIDLNLRSDACYILVGGLGGLGRSLAMMLAENGARKLCFLSRSGAASASANDLISDLEELGVQVRCLQCDVSEISALKHALDTCSAELGPVHGVIQCAMVLRDTLFTNMSYIQWQESTLPKVQGTQNLHNALPDVDFFVALSSFAGTFGNRGQSNYAAGCAYQDALALQRRDEGKKATTLDVGLMRDIGVLAENGMTDNLKEWEEPYGVREGELRNLVKLAIAGRLPAQVLTGLATGGSAVVAGIPPPFYLSDAKFSIMATTDLEKVSDSAGDSNNRRKSDSIRALISKSENLVEASGHITASLVSRIAKMLQIEAEDVDTSRALHSYGLDSLVAIEIVDWALKEIEARVSVFDIMAAVPITATASKIANASVLCSKE

SEQ ID NO: 245 - protein, 1732 aa, Artificial Sequence
  PKSC18B
MSSTAITRRHLLLFGDQTVEKLTSIRALVRNAKTSPAAKRFLQEITDVIQIEFSTLSKSEHGWTGTFDTLLGLAEENDEQNGANTLVSTVLMCIGRLGELVVHAERDPTILGTPERPVEILGFCTGLLPAAVVVAAKDTSELHTLARDIVQVTFRMTREIVRQTKLVEDSSGDWARTYIGITREKMESILDDFHTSNSIPPTRQISVGVVSEKWTTIIGAPSSLARLSSWSSEIQSASHAKTDIGALIHSKVLPPLDLEKILAPFSWRDRVLDWTKARMISPASCTDYTNSSLGSLVGQIINDIASNALLIDETIQACISRLDKATAFSVTVPGPTGYLPAVEQAFRSSKVQYELNKQTTDATGSGRGGSDMIAIIGMSGRFPGTNSPEEFWDDVLAANCHIESVPKSRWDLDVFFDPEDKSTRKNATTAMHGAWLESPGLFDNRLFNMSPREASQADPIHRLLLTTSYEALESAGYSPDGTISTESNRIASFFGQTSADWQDVLNQEGIDIYYIPGVGRAFASGRVNHHFKWGGTSLSVDAACATGIATVSLAVSALLARECDMALAGGGAVHVSPNTYSGLSKAGMVSTTGGCRTYHDDADGYVRGEGVGVVVLKRLEDAVAENDNILGVIRAAAQTYTSTSSSILHPSHVSQERIYREVLHQSGLQPQDIDYVEMHGTGTQAGDVEEMTSVINVLAKNHTKNEPLTVGAVKAVVGHGEAAAGVTSLIKALMMLRDGLIPAQPGWPFKVNRNFPSLAKANVRIATKTLDLKPSSKADKKAKILINSFGASGSNSCVIVEEPPEIPEKQDDPRGFHVVTLSARSAFSLKKNRENLVDYLERKPETRLADLAYSTTARRMHETLRIAYVGNSVRDVVRQLRHDATNGGPNDPKSKTKKSPRLFLFTGQGSQYAGMGADLFAADKGFAELLGTYQDMATNLGLPEFVDIIRNKEIDMTTKSPAQVQLAVVALEIAIAHTLKKWGVFPDAVLGHSLGEYAALAVSGALSVADALYLVGKRALLMEKHLEPHTYAMLVTSLSAEDLQQRIEELKLESCGIACANGPSVAVASGPVNDLKKLEQHLLDTSDIKSTFLKVPFGFHSAQVEPILEEFEKIADGVTFSNTHTTFVSSLTGTTESSVSPAYLSRQTRESVQFTKALEACEAAGLIGGNSLTMEIGPDPVCLSLVRRTLNIPGSARLIPSLKSGQDNWSTISTALKAAYETGVNVNWPEFHKGFKNSVRLLDLPTYAFEYKDFWTRYQELEPVQTTAPSPVVEKVQPPKYPGFTSTSSVQRIESESIQGSKITVIYSSETSEPALLQAIQGHSVVGRTICPMVVYCDMAIAATKYAYWRLHDTKQTPDLSIYDMEMARALVIEERGSRPVINIRNIYNQDQGFARVTFYSITPEGKEVAYGACKVKVAKGAAQKNSPQQLDFLLRSRMVTLQEYSKNRKAHAFLKPVVYRLFANVVGYGEAYQGLEEVVVDTRGSDGMGTVRLPQSDSTGHFTLDPYLNDAAIHLCGFLVNSGLNYPQDDVFICPGFQSWRFFEALHPGKAYSTYVYMQESASNDGSMLGNCYVLDGDRIVQELVGIKFQKMKRAVLQLSLTSTGAQPRHPPTETHRPKSPIPQFSSIEPTTISTTEPQASDDSASTGTKTPEASDSEIIDTLLSIVAREIGVNVEEMLDETAFIDLGVDSLVAVTIFTTLEREVGLKLQASFFVEHTTVGDVKRALHEML

SEQ ID NO: 246 - protein, 375 aa, Artificial Sequence
  PKSC18C
MSSPDTAVSPEEELLAVIAEELGMDIDDLSDDTDISHLQNDTALSRLILKRVPVGLQDDINRTTFQSCTDIADLKAHIDKVMALREPPKQSDKRKAKLPIVLLLRGNEATAKKKVFLLPDGSGSGMAYMSIPPMDPSICLYGINSPYLHSPEVFNGTIDDLAQIWTAEIQKVQPNGPYTLGGWSAGGYFSFEVSKLLISKGERVEKLILIDSPCRLLFEALPPQVVECLAKNNLMGNWSEGGTPKWLVNSFVSTIGAVEKYMPTPMVIPDGAKAPEVFIIWASEGVFPDGVEAYPELDMSVRVTRFLVNKRVQFGPLGWDRLFPAQDISIAKMPGSHFMIVHQPNVDTLGKLLRDIIQGRRADAKSDWQKWRNRS

SEQ ID NO: 247 - protein, 2365 aa, Artificial Sequence
  PKSC19A
MSSATAGNDGTSIAITGLSCRFPGDGDNPAAWSMIPKERFNGYAFWAGGKKGHGSITKSGHFLKHDVSHFDANFFNISALEANAMDPQHRLALEVVYEALESAGYSVKDLAGTRTGVFMGHFTSDYKELVISDTDGIPPYATTGLNKTSLANRISWTFDLRGPSFALDTACSSSLVAFHLACQSLRTGESDIAIVGGTNVLLNPDMFVAFSGQGFLSPDGKCKSFDASGDGYGRGEGVAAIVLKRVDDAIVALDPLRAIIRATGSNQDGHTKSLTLPSADAQEALIRDVYRLAKLDFDQTGYVEAHGTGTQAGDTTETLALSRTIAKGRSSKNKLVVGSVKANIGHLEAASGLAGVIKSVLMLEHGVIPPNIHFHNPNPKIDFEHWNIQIPTQLMKWPSQGTRRISINSFGYGGTNAHAILDDAYSYLGGRGLRGLHYVSWEDHENREEEEEDDEYDPQPNTPRVYVLTAQDRAGLSRTKKSLASYLRTKIDELHDDDSQAEKYLADLAYTLSDKRSRLQWKTFALASSLDELADALESADGGRIEVMSSSVPRLGFVFTGQGAQWATMGMALMAFPEFSASIEAADLFLKKTLGCPWSARAEISRGKGTSRLGLALYSQTLCTVLQVALVDLLRKWAVVPDAVVGHSSGEIGAAYCAGYLSREDAWRIAYCRGVVCSNMKTAAPDLEGAMMAVGASPDTCSAFIERVCPDKVNIACINSPSSVTLSGDAAAIISLQAALQEENIFARKLLVDTAYHSKHMKLVAEQYAKAIADIQPRANTTTGGDAACKMYSSVTESEITYKDLGPDYWVRNLVSPVKFATAIQNLMRPDAEARSSGTDAVDILVEIGPHTALRGPATQSIQALGVNNKPYLSAVVRNESAVETTLNLIGTLIAYGRPVELASLNGTVAGKNKILIDLPSYPWNHAQQYWSESRLARGRKDRPVSASSLLGSPVPSFLEGERVWRGFLRLSEEPWMADHNIQDSVLYPGAGFLAMAIEAALQGADTARKVKGLSLRDIEFLSAMLVPEDEELEHTITLRPHSSVTNSSEELWNEFVICSSPDRKSLVRNCRGLIRVCYDDSGAENLITEKEAQEDPGLLRYKQASSSCKEEQQPAELYQTLTDLGYNYGLTFANITEVSVGDGQSCGSVTIPSVGLHDTQRPHVIHPATLDAMFHLAFAAANSNHLSKLTVPMVPKSMDEMYISTDIPYLAQTKLKGYSKARKLGSRRLLKATIGIVDEEEQQSVLEISGLHCTEIAQTSAAQKTAVLARKICSRLVWRPSINFITNEDIQRIVSISTEPSTQTSNYQQLSEMYHLVMADNGFSKFINIIHHTTPTMHIVELAQESSTFAQDKTLLKDVLQTANYTTLGYDGKTKSGPGDSSPAAEGVTLQADQDLFQEHARTADLVVCSAISSAPSSIANNARLLLKEDGRVCAIEAPEQVATAKSVLQEAGFTNFFQFGGSASGEPVFLVGSLESSGNVAGAGLKEKDIVLIQPANANESVTAVTEQLKTTLSALGYSASIYTWGINNVSALKNKDCVSLLEAQSAVLESLAEKDFYAVQTLITQCKSLLWINALDDARKALINGLTRVVRNEIPGSQLQTLHVSSATLSQPNHLSHLICQVLDSKTSDNEFTVENDMIYTSRVEIDEELSAEIDDAQHADATSHVPLTSIDAPLSLTMTSTGTVCFKRDSVPTADLEGDEVEINVKASTISSNHLFADTDEPLISEAAGVIVRVGSSVTKFQPGDSVVTYSLGFAEAISGAAAHAAAWYALDRIARFQSGQSILIHAAAEDVGQAAIQIARNYNAEIYATIKEDAERELLCGTYHIPSDHIFNLQDSHTVDAIKRVNNSRGIDIILGAPKNAAHRQTSQCLAAFGTFVEIGLLDSSHSKVLEATFVPQDTMFSSFSLSNIARKSPQLMTQIIAAVFELHSKGITKPIASSKVFSASEVESAVQYAQTEGQDKTIILSWNDDDSVPLMGSGERQPIDLNLTSDACYILVGGLGGLGRSLAIMLAENGARKLCFLSRSGAASASAKDLISDLEELGVQVRCLQCDVSEISALKNALDVCSAELGPVHGVIQCAMVLRDTLFTNMSYVQWQESTLPKVQGTQNLHNALPDVDFFVALSSFAGTFGNRGQSNYAAGCAYQDALALQRRDEGNKATTLDVGLMRDIGVLAENGMTDNLKEWEEPYGVREGELRNLVKLAIAGRLPAQVLTGLATGGSAVVAGIPPPFYLSDAKFSIMATTDLEKVSDSASDSNNRRKNDSIRALISKAESLVEASGHITASLVSRIAKMLQIEAEDVDTSRALHSYGLDSLVAIEIVDWALKEIEARVSVFDIMAAVPITATASKIANASALCSKE

SEQ ID NO: 248 - protein, 1733 aa, Artificial Sequence
  PKSC19B
MSSTAITRRHLLLFGDQTVEKLTSIRALVRNAKTSPAAKRFLQEITDVIQIEFSTLSKSEHGWTGTFDTLLGLAEENDEQNGANTLVSTVLMCIGRLGELVVHAERDPTILGTLERPVEILGFCTGLLPAAVVVAAKDTSELHTLARDIVQVTFRMTREIVRQTKLVEDSSGDWARTYIGITREKIESILDDFHTSNSIPPTRQISVGVVSEKWTTIIGAPSSLARLSSWSSEIQSASHAKTDIGALIHSKVLPPLDLEKILAPFSWRDRVLDWTKARMISPASCTDYTNSSLGSLIGQIINDIASNALLIDETIQACISRLDKATSFGVIVPGPTGYLPAVEQAFRSSKIQYELNKETTDATGSGRGGSDMIAIIGMSGRFPGTNSPEEFWDDVLAANCHIESVPKSRWDLDVFFDPEDKSTRKNATTAMHGAWLESPGLFDNRLFNMSPREASQADPIHRLLLTTSYEALESAGYSPDGTISTESNRIASFFGQTSADWQDVLNQEGIDIYYIPGVGRAFASGRVNHHFKWGGTSLSVDAACATGIATVSLAVSALLARECDMALAGGGAVHVSPNTYSGLSKAGMVSTTGGCRTYHDDADGYVRGEGVGVVVLKRLEDAVAENDNILGVIRAAAQTYTSTSSSILHPSHVSQERIYREVLHQSGLQPQDIDYVEMHGTGTQAGDVEEMTSVINVLAKNHTKNEPLTVGAVKAVVGHGEAAAGVTSLIKALMMLRDGLIPAQPGWPFKVNRNFPSLSKANVRIATKTLDLKPSSKADKKAKILINSFGASGSNSCVIVEEPPEIPEKQEDPRGFHVVTVSARSAFSLKKNRENLIDYLERKPETRLVDLAYSTTARRMHETLRIAYVGNSVRDIVRQLRHDSTNGGPNDPKSKTKKSPRLFLFTGQGSQYAGMGAELFAADKGFAELLGTYQDMATNLGLPEFVDIIRNKEIDLTTKSPAQIQLAVVALEIAIAHTLKKWGVFPDAVLGHSLGEYAALAVSGALSVADALYLVGKRALFMEKHLEPHTYAMLVTSLSAEDLQQKIEELKLESCGIACVNGPSVAVASGPVNDLKKLEQHLLDSSDIKSTFLKVPFGFHSAQVEPILEEFEKIANGVTFSNTHTTFVSSLTGTTESSVSPAYLSRQTRESVQFTKALEACETAGLIGGNSLTMEIGPDPVCLSLVRRTLNIPASARLIPSLKSGQDNWSTISTALKAAYETGVNVNWPEFHKGFKNSVRLLDLPTYAFEYKDFWTPYRELEPVQTTAPSPVVEKVQPPKYPGFTSTSSVQRIDSESIQGSKITVVYSSETSEPALLQAIQGHSVVGRTICPMVVYCDMAIAATKYAYWRLHDTKQTPDLSIYDMEMARALVIEERGSRPVINIRNIYNQDQGFARVTFYSITPEGKEVAYGACKVKVAKGAAQKNSPQQLDFLLRSRMVTLQEYSKNRKAHAFLKPVVYRLFANVVGYGEAYQGLEEVVVDTRGSDGMGTVRLPQSDSTGHFTLDPYLNDAAIHLCGFLVNSGLNYPEDDVFICPGFQSWRFFEALHPGKAYSTYVYMQESASNDGSMSGNCYVLDGDRIVQELVGIKFHKMKRAVLQLSLTSTGAQPRNPPAETHRPKSPIPQQFSSIETTTISTTEVQVSDDSASAGTKTPEASDSEIIDTLLSIVAREIGVNVDEMLDETAFIDLGVDSLVAVTIFTTLEREVGLKLQASFFVEHTTVGDVKRALHEML

SEQ ID NO: 249 - protein, 375 aa, Artificial Sequence
  PKSC19C
MSSPDTAVSPKEELLGVIAEELGMDIDDLSDDTDISDLQNDTALSRLILKRVPVSLQDDINRTTFQSCTDIADLKAHIDKVMALREPPKQSDKRKAKLPIVLLLRGNEATAKKKVFLLPDGSGSGMAYMSIPPMDSSICLYGINSPYLHSPEVFNGTIDDLAQIWTAEIQKVQPNGPYTLGGWSAGGYFSFEVSKLLISKGERVEKLILIDSPCRLLFEALPPQVVECLAKNNLMGNWSEGGTPKWLVNSFVSTIGAVEKYMPTPMVIPNGAKAPEVFIIWASEGVFPDGVEAYPELDMSVRVTRFLVNKRVQLGPLGWDRLFPAQDISIAKMPGSHFMIVHQPNVDTLGKLLGDVIQGRSADAKSDWQKWRNRS

SEQ ID NO: 250 - protein, 2406 aa, Artificial Sequence
  PKSC20A
MSSGAAKLTDAHSVAVTGLSCRFPGDGDSLDSFWDSICKGESAWSEIPKERFNVDSFWSPSKSRNTMTPKGAHFLKEDISKFDANFFSLPKNDVEATDPQHRIMIEVAYEALERAGLPLEKIAGTRTGVFMGHFTSDYKEMMYRDPDNAPVYGGTGSCTTSLSARISWLWDLQGPCFTLDTACSSSLVAIHLACQSLRTGESDIAIVGGTSLLLNPEMFMYLSNQSFLAPDGKCKSFDESANGYGRGEGFGCVVLKRVDDAISAGDPIRAVIRGTGSNQDGHTKGLTLPNANAQAALIEDVYKTAGLGFEHTGYVEAHGTGTQAGDNEECQALARTIGAAHTSDNRLIVGSVKSNIGHLEAAAGIAGIIKAILILETGLIPPSINFKKLNPKLKFDDWKLQVATKLTPWPTDGVRRISTNSFGYGGTNAHAVLDDAASYLKARGISAVHQTILPHPQHAPSVIGLNDDSAHGKAYKDRTGSRLFVISAQDKDGLKRVKEPLAKYVEAKGSELETGSEEAEEFLSELAYTLSERRSHLQWKTYAVASSSEDLSDVLKSDENPALVAQSSRQPSLGFVFTGQGAQWARMGMELMAYRVFYESVHAADTYLKEVCECPWSAVEELEKGKSTSQLHLAEFSQALCTVLQVALVDLLRSWNIRPNAVAGHSSGEIAAAYAMGALSNEDAWRIAYYRGLLSTEMKANSPDVDGSMMAVGLSPEKAEAWISKVTAGELVVACINSPTSVTISGDTPGIEQLLELLQAENIFARKLQVDTAYHSPHMQAVAQDYYELLADIVPKTPTGDCTMHSSVIGEIIRPEQLGAVNWVRNLVSPVKFSTAITDMLRPVKDGERASENAVDLLVEVGPHAALQGPATQSLKALNVMNIPYQSVIVRNKNAVETALNLAGSLFAQGYAVNIQEVNSDGNKQFAKPLVDLPTYPWKHTQRYYHDVRIEKEYLNRKQPKLSLIGAPAPAVGEREYLWRGHIRLSEEPWIGDHKIQGAILYPAAGYLAMALEAASQIGDETKKIASYTLRDIQLTSAAIISEEADLECIVQLRPHISSTRDSSSSTWTEFTVTTSPDGSSLVKNCSGLIYIDYEVSVDTDAANERDMHLSSQKREFEQVKSSCDNRINCTEFYADLATMGLQYGPAFSNVREARNGNGQSYGVVEIPDVVGRVPTGSDRPHIVHPGTLDAVFHLAFAAVMDDNALTAMVPKSIDEVQISASVPWTPGVKLPGFSKSAKHGFRELKADIVMLDGEEAAPVMSIQGFLCAEISGGSSGAAQAAPKSITSQLIWRPALGLLSGEEVGKVLEKFEGVEKVVEYVQLAHHENPGLSVLEVAAADQSALFARNDLKVVSKTAKVDIVAPSDEVKAKIEESGPDAVVQSVDLTTNVSKETFQDATFDLILLTDIASLTTNPSTVLSNLSRILKPTGKLCLFSTTTTPLQTTLTATKTFQPTTTVQTPTTQLLIAKPTSHPPPTNGVTNHPSSSSPTTFTLLTHPNPTPATTSLITSLTTTLSTHSLTLETLPWNPTNTNPSTLANKTLISLLELETPFLSTLSPADWEPLKATLLTPTSVFWITGFTSPAAYMIDGLTRVVRNENPGGAKLRTFHTHPSSLLTNPSLLASLIAKTLLEHAVDDETEFVVEDDVVKVSRVHEDVALNDEINGLLPGAGAAKNVVDMKLKEVPHAVKMVVQTPGMLDSVALERDELEGTELRDNEIEIKVVASSINFRDVMVSLGQIPDSKLGFDNAGIVTRTGSLVTKFKPGDRACMYGHGAHRSLHRSREDYCALIPPSMTFEQACTVPGIHGTAWNALVRLARVQKGQSILIHAAAGGVGQAAIQVAQFYGMEVFCTVGSERKRRLLKEEYGIGDDHIFNSRDLSFVKGVKRMTGGRGVDVVLNSLSGEALRQTWHCIAPFGYFVEIGLRDILANTGLDMRPFMQDATFSFFNLNHIEKAAPHVMAAIIEGSFDFFRRGISRPVTPLVSYPVSDMESAFRLMQAGKHVGKLVFTWGDEDVVPVIQTQKSVKLDASKSYILVGGLGGLGRSLSMKLVALGARNIAFFSRSGAKSPEAQQLVADLEKQNVNVRAYICDVSDEAAVQSSIAQTTSDLGPIDGVFQCAMVLRDTLFTNMTYTQWTESTRPKVQGSWNLHKHLPANLSFFLTLSSFAGVFGNRGQANYAAAGAYEDALAQHRRSEGKHATTLDLGIMRDIGVLAETGITDALKDWEKPYGIRENEFHALMERAIDGDVRGTTAPQVITGLATGGSAVAAGIDAPFYLEDDRRFGVMALMGLREQSSSSSSSSSSAPVHTLIASASSLEEAQNAVTEALVRQVAKMLSMPVAEIDPGRFLHSYGIDSLVAIEVVNWALKECKSSVTVFDVLAGVPMTTLTGKMAAKSQALKRELAPI

SEQ ID NO: 251 - protein, 2022 aa, Artificial Sequence
  PKSC20B
MSSTIPNRPTNLVLFGDQTVEKRTSIQTLVRHSKTSHAARRLLQEATDLVQLHFNRLSDEDKQWDHEIHTLLGLAEDNIAESKPNGAIATVLMCIGRLGELLVYAEEDPSILGSENDPVEVLAFCTGLLPAAALVAARDTSELFDLAKEIIAITLRMTLEMHRRIIMIEDTNLSWATTLVGKTPGKVQPILDEFHQSQHIPYSKRIAIAVVSTGWLTLIGAPSSLRRLMEFSKELEDAPKMKTETNGAVHTQYMPTYDLEKVLGNSPLLELPITSKARIHSPASCKQYTHTTLRSLMSEILPDIAHRILRIDDTAEACISKIASDKPLVMTVAGPTGHQTAVEKVLKSKSIKYQIKEHRRANKDSGRGGSDSIAIVGMSSRLPGSDNVEAFFESLLEQQVQIKKIPKSRFDLETYYDPTGERRHTTSTDQGAFLDRPGYFDNRLFSISAREAAQMDPLQRMLLTTSYEALEMAGYSKNATPSTQDNRIAVYFGQAADDWRGVLNNDEEIDIYYVPSLSRAFGPSRVSYHHKWGGGTYALDAACATSTTAIHLACKALSSRECDTALAGGGSLCVSPTAFAGLTKSGMVSEKGGCRTYHDDADGYARGEGIGVVVLKRLEDAIAENDNILGVIRGHARTYTSTSTSITHPSAECQARVYEEVLRQTSVVPNEIAYAEMHGTGTQAGDYEEMSSVIRVLGQDRSKKNVLTVGAVKANVAHGEAVAGVTSLIKVLMMMKEKKIPPQPGLPFKLNRKFPRLENVNVRIAGIGNKDLTLKPSPASSDGKIKCLVSSFDASGGNTSLVVEEAPAVAKKTENPLPAHVVTISARTSFSLQQNRKSLLDYLMRNPQTKLADLAYSTTARRMHEVLRVAYSGKTTKEIINSLREDVSSNGAKDPKKKALASSVVFAFTGQGSQYAGMGRQLYQHSAELRAALQNYEQMAEHQGLPKFLHLIADEKVDIAAASATEVQLAVVALEITTAKLVESWGIKPDFVVGHSLGEYAALCVAGVLSGSDALYLVGRRAQLMEQQLTAGEYAMLAISKDADSARKLLAEQANVAGKTAVACINAPQVTVVSGPVKEIDNLKVQLEREGSRATVLRTPYGFHSHHIEPILDAYKAIAQGVTFAAPTIPVASTLLGNIVEIGDTSVFSADYLVRQAREQVNFTGALQSLQNGTGAKVQSTFVEIGPEPVCLGLVRRTLDIPTTRLLPMIKSSEDNWSTVSSALASLYQAGADIKWSRYHQNFVGSLRLLPLPTYAFDEKNFWKAFVEPINPGLALPAPSNALEKSSKIPVAPAFSTTTLQWIESETVTDKTTSVVFAAHTAEPHLYEAIKGHVVNGVTLMSLSIFCDMAKTGVQYAYQKLVPGSKVPKMSVYDMNMTHALVVPHADPEQIVRTKVTLSQGENFAHVSFSSTKKGSSTEHGDAKIVFEDSAAFFAEQSQTSFLVSSRIDALKDMSSTGKAHHLLKSVAYKLFDNLVAYGKNYQAMEELWVDEYSRDAVCTVKLPNTAGSGTFTHNPFWADAAVHLAGFLVNSGLKYPEEIVCLSTGFSSSRLIEELQQDETYTTYVTMQDTETPNILTGSAYVYNGKMKLVQVSTVLTSILGGSVAARATPSTSVPLPPVEKTVAWQKDLLAVSNRTRPSTGFSTPATQVTDYSFSEAGYRSGVSTPATSIESPPASAKPDLFAKLQNIVIAESGCSESDLEPGASFADLGMDSLMAITILATFQKETGVELPPTFFLDHQTVAEVKEALPGGDSNEAKGASPADSEDETEATPKAILLNGTPGSTTTQSVFLLPDASGSPSRYIQLPSFGDSLCTYGLESPFLKTSLAEAIYSVPELCVSFANAIQDVQPHGPYILGGFSVGALYAFEVAKVLSGRGEAVEKLLLVDMSVPSHNTNVGEIDLATLTAAGMLPTQGRMLASQKEHFVSALRALAAYKAVPFSSTDKRPQKTTLVSSNAGLAVGKTSDLACWAQGASEGVARGWAALLAGDEVVEVKVDAEHWSLFRHPHVSLFLEVITLEMV

SEQ ID NO: 252 - protein, 404 aa, Artificial Sequence
  PKSC20C
MSSSTTSKIFTIIATEIGIDASELEDDMEFTELGVDNFLAKSILAEIAKETRLNLPSTLFADYPTPEDLRAHLATITPARNTTPPQPLRSSLKPSKNGYTNGYTNGHTTNGYTNTTPAPPTTKTPLSIPLQTPPTAIQTLFLLPDGSGSGMAYARLPPLSPSITLIALNSPFLKSPPSSTTFTLPSLCALFASEIQRLQPHGPYFLGGWSAGGYYSFEVAKILREKGEEIRKLVLIDSPCRLVFEALPMGVVRWLSAKGLMGNWGPAGRGPPAWLVDHFEVSIRAIEGYAPVAFPQGKGGEADEMEVFLIWAEHGVLRDGAERPQKGELDMKVRITEMLLERPVVRGAQGWERLFPGRRLRVAGMGGNHFTMVYPPHVSVLFFSHFPVCFEVVIWGDECLLVVC

SEQ ID NO: 253 - protein, 458 aa, Artificial Sequence
  PKSC21C
MSSLRGTSYPATQERVAPRDDTESLISSMWSELLGHEDFGVTDDFFAVGGHSLLATILLTRIRKKTGLSLSLRKLLEGPRVDRLAASVRELRKETDDQASDLLLTLRQGMPGGPRLFLVHPIGGDVLCFREVASALPPEFTVIGVRSPGLDGGTAFTSVQEMAAAYLHEVLKVQPEGPYHFAGWSMGGAVAYEMARQLSFEGVRTASLVLLDSYAPGSKAFEHFAGPDADRVASFTRDLERMTGERADTALLTGERPAAGEEQEALRRRFAVFDANATALVDYRMRRARLRDTRLTLVLAGDQTRPEGTSPALGWEEALGTPVETRTVAGADHFTLVQRSHAAATAGEIARAVVPGTAGQDEGHGPGDVVAVRGGRSPETVVAMLGVLRAGAVLVMIDVTQPEGRVSDVLERARPSLLVDTTDRTWDPGHGTTPVVRLAELEQSAARDVELPVVGAAA

SEQ ID NO: 254 - protein, 365 aa, Artificial Sequence
  PKSC22C
MSSLRGTSFPALQERVAPRDDTETLITSMWAELLGHEDFGVTDDFFAVGGHSLLATILLTRIRKKTGLSLSLRKLLEGPRVDRLAASVRQLREESDDQASELLLTLRQGSPKGARLFLVHPIGGDVLCFREVASALPAEFTVIGVRSPGLDGGTVFTSVQEMAAAYLHEVLKVQPEGPYHFAGWSMGGAVAYEMARQLSFEGVRTASLVLLDSYAPGSRAFEHFAGPDADRVESFARDLERMTGEGIDTALLSGDRPTAGEEQESLRRRFTVFDTNATALVDYRMRRARLRDTRLTLVLAGDQTRPEGTSPALGWEEALGTPVETRTVPGADHFTLVQRSHAAVTAREIARAVAPGTAGQNEGRG

SEQ ID NO: 255 - protein, 367 aa, Artificial Sequence
  PKSC23C
MSSAVTVWQDALNIIAQESGLEPAEIIETDDTAFLTLGINQILATAILAHLRGPRGEPLPRDIFDQKPTVGAFRRFYETPIHLDIAPVAAPAPPKLKRVPSSSVPLSIVLQNNPASSRHAEKTNIFLLPDGSGSGMAYVEMPLIDPSTVCLVALNSPYLNRASEYCCSIEEIAREYVQEIRKRQPHGPYVLGGWSAGGYYSYEVACELIRQGERVKKLILLDSPCRPDFEELPMEVVQYLSKKNLMGNWDRSARHTSVPSWVIEHFRSTLRAVREYVPVPMDAADAPDEVCIIWSREGVMPANQLRRTGLDLRVRVARFLLEGKPDLTSAYGWDRLFPGAHISISSISGNHFTLINKPNVSVCSFPE

SEQ ID NO: 256 - protein, 1968 aa, Artificial Sequence
  PKSC24B
MSSKLRVANFLLFGDQTVEKLPAIRHLVSHGASSPLVQRFLRQLCDAVQLQVSKLPLHSEQRSNIGNFDSILRLAENNARLEEPNEIIATVLMNIARLGELILYAEQDPTVLASKGNRNCILGFCTGEVAAAVAAVAQDTNELVELGVEVTHIIFRMARELNRRSLMVDRTNGPWARTILGISVDRVREILQDFHENQSIPRARQVCIGFVSDGWLTLFGPPTTLQRLLEWSAELEDAPQIDTDARGGVHMETLPEVDPDRILGSSPWLDRAPVHTATIISPYTCKPRQQKTLRGLLEEIIADVGQRTLNLATSMNAALELAQADKIRLVMPGYTSHDVYFQKLLQKRGIEYSVMSHGDHLSSGPSRQGSGLVAVVGMSGRFPGSGDINAFWEGLLEGKRYIQEIPNTRFDLEQWYDATGKQKNSTMARTGAFLDKPGMFDNRLFDMSPREAMQTDVQHRLLMTTSYEALEMSGYYPDGTLSTNKDRVASFFGQTSDDWREVVVHQGVDIYFATGSCRAFGPGRLHHHFKWGGPSYSVDSACSSSIAAVGLACSALLGRECDMALAGGGSLLLSPSPFSGLSRGGFLSAHGGCQTFHDNADGYVRGEGVGVVVLKRLEDALDDQDNILGVVRGSGRNYSSDASSMMHPSANAQKKLYCDVLEQSGVEANSISYVEMHGTGTQAGDFMEMSSVLSTFAEKRGSDNPLIVGALKANIGHGEAAAGVCALIKTLMMLQSRQIPPQPDLPGPINHRFPDLAARNVYIAARNMRLEASPVAKGTLRVFLNSFDASGGNSCLLLEEAPPRAVKDADPRGHHVVTFSARSQKSLISIKERYLAHLRQHPGTKLADLAYSTSARRIHGLLRYAIAASSIDEVVQCLETDLAQGKTPRQPPATPTVVFTFTGQGAHYVGMGANLWETSATFRNTLHDYQTMASAQGLPHFLHLITDSSTPAPQSGPDTVQVQLAMVSLELALAKLWRSWGIQPAMVLGHSLGEYAALCVAGVLSVSDTLYLVAKRAQIMAGALTPHEYGMLAVNLSVADTREVLSSGQHTSCAVACINAPKMTVVSGLRSKLDDLQDQLKSDGTRCTPLSVPYGFHSSQLDPILGQFEEACQGVTFSAPNVPVVSTLLATTVREEGTFSPEYLARQAREPVDFVGALGAVQEHKFPSLTFLEIGPDPVCSGLVNATLGADEAALRCVASMHRGKANWASISCSLRDLYTAGAAIDWPAHHRDFKSSVSLLDLPKYSFDEKEFWASFPDRDLQTIGDVETKHSQPPAIVPSVQGYCTTTLQRITRETIEPDGLSVTFSSDLADQHLRAAVRGHAVADVEICSSSLLLDMALSAAQYAYMKHSPGQKMPVPLTVRNCYFHRGVVLTDKAQTVEVTVTLTSSAKTADIRYHCRTPDEYYEVGACQVVLKPASKPDQAGFLVRSRMAALKASASHRLGRRAVYRLFDNVVRYSEQYQGLENVHLSEDMQDAVAEINMAQVPAAGGHYLHHPFLLDSIVHLSGFLVNNGLRYSSEWACLSTGFDEWHLLKPLDPTTVYTSYTFMEDSRSTSNLVTGDVYVYDGEELVSVLTGLQFQKMKRTALTHLLSPPTIGNMAAKPSTRMPTMAQTELLPVPTPPATASVDDGEGEKFDLVNTLFSIIAREVGVEPSDLEGDVNLANLGIDSLMAITIISVMQQETGVELPGTFFLDNATTTAVIAAVGNKTVFLLPDGSGSAMAYANLPPVHPAVCIVGMNSPYLRDAGSYRCSVEDLASQWVREVYRRQPRGPYIVGGWSAGGYYSYEVAKRLLQDGHAVAKLILIDSPCRTVFESLSMEVVNYLSSRNLMGNWGSPEMPEWLVQHFRSTLAAVGKYRPRPIDSAGEMQTYIIWSRDGVLDQDALARSGLDTSVKVSRFLLQGKDDLGPNGWDDLLPSKDMAIATQSGTHFTMINKPHVAQMSDLLRDAVIGIGSDRQAHWQRVSQS

SEQ ID NO: 257 - protein, 2085 aa, Artificial Sequence
  PKSC25B
MSSKLRVANFLLFGDQTVEKLPAIRHLVSHGASSPLVQRFLRQLCDAVQLQVSKLPLHSEQRSNIGNFDSILRLAENNARLEEPNEIIATVLMNIARLGELILYAEQDPTVLASKGNRNCILGFCTGEVAAAVAAVAQDTNELVELGVEVTHIIFRMARELNRRSLMVDRTNGPWARTILGISVDRVREILQDFHENQSIPRARQVCIGFVSDGWLTLFGPPTTLQRLLEWSAELEDAPQIDTDARGGVHMETLPEVDPDRILGSSPWLDRAPVHTATIISPYTCKPRQQKTLRGLLEEIIADVGQRTLNLATSMNAALELAQADKIRLVMPGYTSHDVYFQKLLQKRGIEYSVMSHGDHLSSGPSRQGSGLVAVVGMSGRFPGSGDINAFWEGLLEGKRYIQEIPNTRFDLEQWYDATGKQKNSTMARTGAFLDKPGMFDNRLFDMSPREAMQTDVQHRLLMTTSYEALEMSGYYPDGTLSTNKDRVASFFGQTSDDWREVVVHQGVDIYFATGSCRAFGPGRLHHHFKWGGPSYSVDSACSSSIAAVGLACSALLGRECDMALAGGGSLLLSPSPFSGLSRGGFLSAHGGCQTFHDNADGYVRGEGVGVVVLKRLEDALDDQDNILGVVRGSGRNYSSDASSMMHPSANAQKKLYCDVLEQSGVEANSISYVEMHGTGTQAGDFMEMSSVLSTFAEKRGSDNPLIVGALKANIGHGEAAAGVCALIKTLMMLQSRQIPPQPDLPGPINHRFPDLAARNVYIAARNMRLEASPVAKGTLRVFLNSFDASGGNSCLLLEEAPPRAVKDADPRGHHVVTFSARSQKSLISIKERYLAHLRQHPGTKLADLAYSTSARRIHGLLRYAIAASSIDEVVQCLETDLAQGKTPRQPPATPTVVFTFTGQGAHYVGMGANLWETSATFRNTLHDYQTMASAQGLPHFLHLITDSSTPAPQSGPDTVQVQLAMVSLELALAKLWRSWGIQPAMVLGHSLGEYAALCVAGVLSVSDTLYLVAKRAQIMAGALTPHEYGMLAVNLSVADTREVLSSGQHTSCAVACINAPKMTVVSGLRSKLDDLQDQLKSDGTRCTPLSVPYGFHSSQLDPILGQFEEACQGVTFSAPNVPVVSTLLATTVREEGTFSPEYLARQAREPVDFVGALGAVQEHKFPSLTFLEIGPDPVCSGLVNATLGADEAALRCVASMHRGKANWASISCSLRDLYTAGAAIDWPAHHRDFKSSVSLLDLPKYSFDEKEFWASFPDRDLQTIGDVETKHSQPPAIVPSVQGYCTTTLQRITRETIEPDGLSVTFSSDLADQHLRAAVRGHAVADVEICSSSLLLDMALSAAQYAYMKHSPGQKMPVPLTVRNCYFHRGVVLTDKAQTVEVTVTLTSSAKTADIRYHCRTPDEYYEVGACQVVLKPASKPDQAGFLVRSRMAALKASASHRLGRRAVYRLFDNVVRYSEQYQGLENVHLSEDMQDAVAEINMAQVPAAGGHYLHHPFLLDSIVHLSGFLVNNGLRYSSEWACLSTGFDEWHLLKPLDPTTVYTSYTFMEDSRSTSNLVTGDVYVYDGEELVSVLTGLQFQKMKRTALTHLLSPPTIGNMAAKPSTRMPTMAQTELLPVPTPPATASVDDGEGEKFDLVNTLFSIIAREVGVEPSDLEGDVNLANLGIDSLMAITIISVMQQETGVELPGTFFLDNATTTAVIAAVGNKMAVTVWQDALNIIAQESGLEPAEIIETDDTAFLTLGINQILATAILAHLRGPRGEPLPRDIFDQKPTVGAFRRFYETPIHLDIAPVAAPAPPKLKRVPSSSVPLSIVLQNNPASSRHTVFLLPDGSGSAMAYANLPPVHPAVCIVGMNSPYLRDAGSYRCSVEDLASQWVREVYRRQPRGPYIVGGWSAGGYYSYEVAKRLLQDGHAVAKLILIDSPCRTVFESLSMEVVNYLSSRNLMGNWGSPEMPEWLVQHFRSTLAAVGKYRPRPIDSAGEMQTYIIWSRDGVLDQDALARSGLDTSVKVSRFLLQGKDDLGPNGWDDLLPSKDMAIATQSGTHFTMINKPHVAQMSDLLRDAVIGIGSDRQAHWQRVSQS

SEQ ID NO: 258 - protein, 488 aa, Artificial Sequence
  PKSC26C
MAVKHLIVLKFKDEITEAQKEEFFKTFVNLVNIIPAMKDVYWGKDVTQKNKEEGYTHIVEVTFESVETIQDYIIHPAHVGFGDVYRSFWEKLLIFDYTPRKGSTGGSGASTGGMAVTVWQDALNIIAQESGLEPAEIIETDDTAFLTLGINQILATAILAHLRGPRGEPLPRDIFDQKPTVGAFRRFYETPIHLDIAPVAAPAPPKLKRVPSSSVPLSIVLQNNPASSRHTVFLLPDGSGSAMAYANLPPVHPAVCIVGMNSPYLRDAGSYRCSVEDLASQWVREVYRRQPRGPYIVGGWSAGGYYSYEVAKRLLQDGHAVAKLILIDSPCRTVFESLSMEVVNYLSSRNLMGNWGSPEMPEWLVQHFRSTLAAVGKYRPRPIDSAGEMQTYIIWSRDGVLDQDALARSGLDTSVKVSRFLLQGKDDLGPNGWDDLLPSKDMAIATQSGTHFTMINKPHVAQMSDLLRDAVIGIGSDRQAHWQRVSQS

SEQ ID NO: 259 - protein, 487 aa, Artificial Sequence
  PKSC27C
MAVTVWQDALNIIAQESGLEPAEIIETDDTAFLTLGINQILATAILAHLRGPRGEPLPRDIFDQKPTVGAFRRFYETPIHLDIAPVAAPAPPKLKRVPSSSVPLSIVLQNNPASSRHTVFLLPDGSGSAMAYANLPPVHPAVCIVGMNSPYLRDAGSYRCSVEDLASQWVREVYRRQPRGPYIVGGWSAGGYYSYEVAKRLLQDGHAVAKLILIDSPCRTVFESLSMEVVNYLSSRNLMGNWGSPEMPEWLVQHFRSTLAAVGKYRPRPIDSAGEMQTYIIWSRDGVLDQDALARSGLDTSVKVSRFLLQGKDDLGPNGWDDLLPSKDMAIATQSGTHFTMINKPHVAQMSDLLRDAVIGIGSDRQAHWQRVSQSGSTGGSGASTGGMAVKHLIVLKFKDEITEAQKEEFFKTFVNLVNIIPAMKDVYWGKDVTQKNKEEGYTHIVEVTFESVETIQDYIIHPAHVGFGDVYRSFWEKLLIFDYTPR

SEQ ID NO: 260 - protein, 111 aa, Artificial Sequence
  altOAC1
MSSLEHYVVFQARPGRERDLDSALRAFASSIADTLPCLAEFSWGENINPSGRQHGYTHGCHARLTTAAALQEEYWVHPAHQLLLGQLDDLCEDRFALDYVTGDEAEGEVPR

SEQ ID NO: 261 - protein, 103 aa, Artificial Sequence
  altOAC2
MSSIRHILLIRFQEKITAEQISVVKTMFLSIPSCIPGVDSVEWGENNSPEGKNAGYTHCVMITFADEKARQRYLPHPDHKAIQSVFRQILSNIIVFDYELMRK

SEQ ID NO: 262 - protein, 110 aa, Artificial Sequence
  altOAC3
MSSTCTSALRHIVLCDFLDGITSTKHAELVYEFSQLKHRIPGVQQFEWGPNVSPEGLEDGFTDCFTLTFDHAGARDAYLTHPAHLAFVELLKPWLGRVLVFDYHPQTHPG

SEQ ID NO: 263 - protein, 110 aa, Artificial Sequence
  altOAC4
MSSTCSIPLRHIVLCDFLEDITPAKHAELVYEFSQLKHRIPGVLQFEWGPNVSPEGLDDGFTDCFTLTFDGASARDVYLAHPAHLAFVELLKPWLGRVLVFDYQPRENPG

SEQ ID NO: 264 - protein, 100 aa, Artificial Sequence
  altOAC5
MSSIRHILLLKFTSEIKEQQLTTIRDTAISMQHQIKGISSIEWGSNVSSENKNKGFTHAITMTFDDHQAISNYLPHPAHDKLKDLLIDSVDDLIVFDYEV

SEQ ID NO: 265 - protein, 110 aa, Artificial Sequence
  altOAC6
MSSTCTSALRHIVLCDFLDGITSAKHAELVYEFSQLKHRIPGVRQFEWGPNVSPEGLDDGFTDCFTLTFDDAAARDVYLTHPAHLAFVEQLKPWLGRVLVFDYYPQEHPG

SEQ ID NO: 266 - protein, 108 aa, Artificial Sequence
  altOAC7
MSSSEPARLLRHVVLFKFRDDTPPEQVKAIETAFCALPRQIDAIHDFEWGTDVSVEGIARGYSHCFLVTFKSEVDRDAYLPHPAHRAFGDLLRPYKEQVLVLDYWAQV

SEQ ID NO: 267 - protein, 107 aa, Artificial Sequence
  altOAC8
MSSSEQSVLRHVVLFQFKDGTPDENVREIENAFRALPGKIDVIQDFEWGTDVSVEGEAKGYTHCFFVTFATEADRDAYLPHPAHAAFGAVLRPHLEKVLVLDYWQRT

SEQ ID NO: 268 - protein, 71 aa, Artificial Sequence
  altOAC9
MSSIPQILSFEWGQNNSPEGFDRGMTHVFLLTFENERARDEYLPHPAHKAFGDTHGGIIEALVVVDYTINQ

SEQ ID NO: 269 - protein, 72 aa, Artificial Sequence
  altOAC10
MSSQIKTIKGFEWGTNNSPEGLEQGFTHCFFLTFDSEEGRATYLPHPAHKAFGEVLSPYLDKVMVLDYWTKE

SEQ ID NO: 270 - protein, 68 aa, Artificial Sequence
  altOAC11
MSSIKHFEWGVNNSPENLNQGLTHCFFVTFSSEKDRDDYLVHPAHKAFTQLLPNILEKVTVLDYWAQP

SEQ ID NO: 271 - protein, 100 aa, Artificial Sequence
  altOAC12
MSSIRHILLLKFTPEIKEQQLTTIRDTAISMSHQIKGISAIEWGGNVSSENKNKGFTHAITMTFDDQKAISNYLSHPAHDKLKDLLIDSVADIIVFDYEV

SEQ ID NO: 272 - protein, 67 aa, Artificial Sequence
  altOAC13
MSSTAYEWGRSESVEGKNDGFTHCFFVTFKDKAGLETYIPHPAHAAFKDIFIPILDKALVYDYTAKN

SEQ ID NO: 273 - protein, 60 aa, Artificial Sequence
  altOAC14
MSSTNVSKEGKSEGLTHSFVLTFKNMEDLDAYIAHPAHQAYVDIVKTRREKVVVFDYWVK

SEQ ID NO: 274 - protein, 70 aa, Artificial Sequence
  altOAC15
MSSDVIVGFEHGTNVSQEGKSEGFTHVFTVTFRDQAGLEKYLVHPAHLDYVKVVRDRREKVVVFDYWTKE

SEQ ID NO: 275 - protein, 115 aa, Artificial Sequence
  altOAC16
MSSAPCASAEEAPAQVLRHMVLLKFKDDATAAQVREIEVAFCRLPSATGVIHNLEWGTNVSPESLDQGYTHCFFLTFKNEADRDAYLPHPAHKEFGALLGPVLDKVLVIDYWTKP

SEQ ID NO: 276 - protein, 72 aa, Artificial Sequence
  altOAC17
MSSDTIYDFEWGKNCSTEGKSEGYTHCFLVTFLSEEGRATYLPHPAHKEFGKLLGPYLEKVLVLDYWAKVPC

SEQ ID NO: 277 - protein, 68 aa, Artificial Sequence
  altOAC18
MSSIGFEHGPNVSQEGKSEGFTHMFVVTFRDQAGLQEYLVHPAHLHYVSVVKDRREKVIVFDYWTPAK

SEQ ID NO: 278 - protein, 100 aa, Artificial Sequence
  altOAC19
MSSIRHILLIQFKDDATPPQVEELKQSFLSMPNIIDGVEYVEWGLNDSSEGKNKHYTHCVMMTFSDEAGRQRYLPHPAHDVLKNIFRPILEDIIVFDYTV

SEQ ID NO: 279 - protein, 108 aa, Artificial Sequence
  altOAC20
MSSNPKLPLLRHVVLFKFRDSSTEDEVEHVVSSFMSLKNQVPQIVAMEWGRNISEENHHQGFTHCFIISYESIQDLTNYQKHPAHLDFQQILGPHMEKVFVVDYYSND

SEQ ID NO: 280 - protein, 45 aa, Artificial Sequence
  altOAC21
MSSLVTFDDAKARDAYLPHPAHKAFVEVLKPILDKVLVVDYVAKK

SEQ ID NO: 281 - protein, 100 aa, Artificial Sequence
  altOAC22
MSSIRHILLLKFTSEIKEQQLTTIRNTAISIQHKINGISSVEWGGNVSSENKNKGFTHAITMTFDDHKAISNYLSHPAHDKLKDLLIDSVDDIIVFDYEA

SEQ ID NO: 282 - protein, 112 aa, Artificial Sequence
  altOAC23
MSSSITHIVQFAFKADASAEDLQKIAAGFLALKDQCLHATTQKPYIQSLTGGKNNSTEGFNNGLTHAFVVHFNSAEDRDYYVNHDPAHRNFVVIAKPLLEKISVLDYTPGVF

SEQ ID NO: 283 - protein, 113 aa, Artificial Sequence
  altOAC24
MSSEKIIHIVHFQFYDTATPEEIKGVCECFVGLKENCIHPTTQKPYILSTTGGKDNSPEGLQGIFTHSYILEFASKEDRDYYISHDPAHMAFGHSLTGIVQKVMVMDFVPGVY

SEQ ID NO: 284 - protein, 112 aa, Artificial Sequence
  altOAC25
MSSSIIHIVLFQFKAGIDPTVVKDTCNRMLALKDNCLHPTSQKPYIKTSSGGSDNSPEGIQHGITHAFVVEFASAEDRDYYTHKDPAHLAFVRTLDGVIEKAQAVDYTPGVY

SEQ ID NO: 285 - protein, 111 aa, Artificial Sequence
  altOAC26
MSSEEAKGVVKHIVVAKFKYDISPQQIEELINGYANLVSLVPSMKAFQWGKDVSAENMHQGFTHVFESTFESTEGVAEYVAHPAHVEYANLLLPCLDKVIVIDYKPTTLHV

SEQ ID NO: 286 - protein, 111 aa, Artificial Sequence
  altOAC27
MSSEEAKGVVKHVVLAKFKEGVSESQIDQLIKGYANLVNLIDPMESFHWGKDLSIENLHQGFTHIFESSFKSTEAVAEYVAHPAHVEFANLFLSHLEKVLVFDYKPTTVCV

SEQ ID NO: 287 - protein, 113 aa, Artificial Sequence
  altOAC28
MSSEGAKAGGVVKHILLAKFKDEIPQYQIDQLIQGYAKLVHLIEPMKAFHWGKDVSIENLHQGFTHVFESTFESVEGIAAYISHPAHVEFANIFLGFLEKVLVVDYKPMPVQL

SEQ ID NO: 288 - protein, 111 aa, Artificial Sequence
  altOAC29
MSSEEAKGLVKHVVLAKFKDEIPPDQIEQLIKGFANLVNLIEPMKSFHWGKDVSVENLHQGFTHVFESTFESTEGMAEYIGHPAHIEFANQLVPVLEKLVVIDYKPTIVHT

SEQ ID NO: 289 - protein, 132 aa, Artificial Sequence
  altOAC30
MSSPKGVVKHILLDKFKDDIPPDQIDQLIKGYANLVHHIEPMKSFHWGKDVSIENLHQGFTHVFESTFESVEGIAEYLAHPAHVEFANIFLPVLEKFLVVDYKPEPILDSHYAQPPRTAYQPLQNSFPFNQV

SEQ ID NO: 290 - protein, 111 aa, Artificial Sequence
  altOAC31
MSSEEAKGVVKHVLLAKFKDEIPTHEIDKLIKGYANLVNLIPPMKAFHWGSDVSIENLHQGFTHVFESSFESTEDIAEYISHPAHVEFANLFLRAVDKVIVIDYKPTIVHL

SEQ ID NO: 291 - protein, 114 aa, Artificial Sequence
  altOAC32
MSSAEEVKEVHHLVMAKFKEDITPEKIEELIEGYANLVNLVPPMKAFHWGTDVSIENLNEGFTHIFHATIESREGLAEYVNHPAHIEFGNLMTPAMEKVIVVDFSPSLVQLQRE

SEQ ID NO: 292 - protein, 111 aa, Artificial Sequence
  altOAC33
MSSEEAEGVVKHVVLAKFKEEMTDDQIDQLIKGYADLVNHVEPMKSFHWGKDVSAENMHQGFTHVFESTFESTKGVAEYVAHPAHVDFANKFLASTEKVVVIDYKPTTVRS

SEQ ID NO: 293 - protein, 111 aa, Artificial Sequence
  altOAC34
MSSEEAKGVVKHVVLAKFKDGIAENKIEEIIKGFANLVNLIEPMKSFNWGKDVSSENLHQGFTHIFESTFESTEGVAEYVAHPAHVDFANLFLSHLEKVIVIDYKPTAVSV

SEQ ID NO: 294 - protein, 111 aa, Artificial Sequence
  altOAC35
MSSEEAKGLVKHVVLAKFKDETPPDQIEQLIKGYANLVNLIEPMKSFHWGKDVSIENLHQGFTHVFESTFESTEGIAEYIGHPAHAEFANQFLPQAEKVVVIDFKPTVVHT

SEQ ID NO: 295 - protein, 111 aa, Artificial Sequence
  altOAC36
MSSEEAKGFVRRVLLFKFKAETAPDHIENLIKDHSNLVNLVESLKSWHMGKDVSVKYSPDGFTHVIELTFESTEGIAAYMAHPAHLEMHERIWPHLEKILVIDYKPTPFCT

SEQ ID NO: 296 - protein, 111 aa, Artificial Sequence
  altOAC37
MSSEEAKGVVKHVLIAKFKEGTSEDQIEHLIKGYANLVNLIEPMKAFHWGRDVSVENMHQGFTHIFESSFESKEGIAEYIAHPAHVDFANLLLPQLEKVIVIDYKPTTVRG

SEQ ID NO: 297 - protein, 111 aa, Artificial Sequence
  altOAC38
MSSEEAKGLVKHIVLARFKDGTAQEEIDQLIKGYANLVNLVEPMKSFHWGNDVSIENLHQGFTHVFESTFESTEGVAEYVAHPAHVEFANLFLSKSEKVLAIDYKPTTVRI

SEQ ID NO: 298 - protein, 111 aa, Artificial Sequence
  altOAC39
MSSEEAKGLVKHIVLVRFKDGTAQEEIDQLIKGYANLVNLVEPMKSFHWGNDISIENLHQGFTHVFESTFESTEGLAEYVTHPAHVEFANLFITKSEKVLAIDYKPTTVRI

SEQ ID NO: 299 - protein, 111 aa, Artificial Sequence
  altOAC40
MSSEVAVGEVKRILLVKYKEEVSPEKIEELTKEWANLVHCIEPLKDFHWGTDISFENKNEGFTHAFVLTFESMEGVAEYFHHPAHVEFGKKAMPCAEKFIVFDYKPTLVKQ

SEQ ID NO: 300 - protein, 111 aa, Artificial Sequence
  altOAC41
MSSEQVKGVVKHMVLAKFKEGVPEEEIEKHIKDYANLLNHIEHMKSFQWGTDVSIENLHQGFTHIFEVTFETLDGRSAYVAHPAHVDFGTAFLTILEKIVVVDFVPTLVKL

SEQ ID NO: 301 - protein, 119 aa, Artificial Sequence
  altOAC42
MSSEREREVKRRGMEGGKGVVKHIVLAKFKEGTTEEEIEKHIKNYADLLNHIEHMKSFEWGTDVSIENLHQGFTHIFEATFETLEGRSAYVAHPAHVKFGTALFPTLEKVIVFDYVPKA

SEQ ID NO: 302 - protein, 108 aa, Artificial Sequence
  altOAC43
MSSEGGKGVVKHIVLAKFKEGTTEEEIEKHVKNYADLLNHIEHMKSFEWGTDVSIENLHQGFTHIFEATFETLEGRSAYVAHPAHVKFGTGLFPTLEKVIVIDYVPKA

SEQ ID NO: 303 - protein, 115 aa, Artificial Sequence
  altOAC44
MSSAAAAGSGGGGVVKHLVIVQFKEDVTPERLDGLIRGYAGLVDKVPSMKAFHWGTDVSIENMHQGFTHVFESTFESTEGVKEYVYHPAHVEFATDFLGSTEKVLIIDFKPAAGN

SEQ ID NO: 304 - protein, 111 aa, Artificial Sequence
  altOAC45
MSSEEAKGVVKHVVLAKFKDDVSPQKIEELIKGYANLVKIVPPMKSFHWGKDVSAENMHQGFTHVFESTFESTEGVAEYVAHPAHVEFANLFLSHLDKVICVDYKPTIVHL

SEQ ID NO: 305 - protein, 111 aa, Artificial Sequence
  altOAC46
MSSEEAKGVVKHIVVAKFKDDISPQQIEELINGYANLVSLVPSMKAFQWGKDVSAENMHQGFTHVFESTFESTEGVAEYVAHPAHVEYANLFLPCLDKVIVIDYKPTTLHV

SEQ ID NO: 306 - protein, 108 aa, Artificial Sequence
  altOAC47
MSSEEAKGLVKHIVLAKFQDDVTTEKIEELINAFANLVNLIPPMKSFHWGKDVSVENLHQGFTHVFESTFESTEAIAEYLDHPAHVEFGNLLLSNLDKILVIDYKPTS

SEQ ID NO: 307 - protein, 113 aa, Artificial Sequence
  altOAC48
MSSAAAAGSGGMVKHLVLARFKEEAMPEALDQLIRRYGGLVHAVPSMKAFHWGTDVSIENMHQGFTHVFESTFESTEGVKEYVYHPAHVEFATDFLGSTEKVLIIDFKPAAVN

SEQ ID NO: 308 - protein, 111 aa, Artificial Sequence
  altOAC49
MSSEEAKGVVKHVVLGKFKEETTSDRIDELIKAYANLVTLIEPMKSFHWGKDVSIENLHQGFTHIFESTFESTEGVAEYVAHPAHVEFANLFLSHLDKVLIFDYKPTTLRC

SEQ ID NO: 309 - protein, 113 aa, Artificial Sequence
  altOAC50
MSSAMEEAKGVVKHVVLAKFKDDVAPERVADLITGYAALVPVIEPMKAFHWGTDVSAENLHQGFTHVFESTFESVEGVAEYVAHPAHVEFANKLLPELEKVVVIDYKPTTIKL

SEQ ID NO: 310 - protein, 117 aa, Artificial Sequence
  altOAC51
MSSADAKGVAEAERVAKHIILAKFKEDVSAEEIQQLIKGFANLVNLIPPMKSFRWGTDAGIEKLTEGYTHVFESTFETTQGIAEYVAHPAHIEYSNLLAPALEKVLAMDYQSNIVQL

SEQ ID NO: 311 - protein, 107 aa, Artificial Sequence
  altOAC52
MSSENQSTEEKKGGKCGGDYKHLVLGKFTQETTQQEIDDLIKGYANLVSLVPPMISFRWGKDVSQENLNQGYTHIFESTFDSTEDIAEYVAHPAHVEYANKLLPKLE

SEQ ID NO: 312 - protein, 111 aa, Artificial Sequence
  altOAC53
MSSEGNKEEVKHILVVKFKPETSEERVEELIKEFSKLTDEIKTIKHFIWGKDESTANLHQGNTHVFQLTFQSMDDVNAYIAHPAHMAFAQQLLGATDSIILMDYKPITVNL

SEQ ID NO: 313 - protein, 111 aa, Artificial Sequence
  altOAC54
MSSEEAKGLVNHVVLTKFKDDVAPERIEDFIKGFANLVNLIPPMKSFSWGKDVSDTSMHQGFTHVFVSTFESTEGVAEYLAHPAHVEFANLFLLCFEKVIAIDYKPTIVKL

SEQ ID NO: 314 - protein, 111 aa, Artificial Sequence
  altOAC55
MSSEEAKGLVKHIVLAKFKDDVAPERIEDLIKAYAKLVHLIPPMKSLHWGKDVSDTNLHQGFTHVFESTFESIEGVAEYEAHPAHVEYANLFLSFAEKIVVVNYKPTTVNL

SEQ ID NO: 315 - protein, 111 aa, Artificial Sequence
  altOAC56
MSSEEAKGVVKHIVLAKFKDETTPEKIEELIKAYANLVNLIPPMKTFHWGKDVSVESLNQGFTHVFESTFESAEGIAEYNAHPAHDEFANLFLSHSDKVIIFDYKPTVFRW

SEQ ID NO: 316 - protein, 108 aa, Artificial Sequence
  altOAC57
MSSEEAKGVVKHIVLAKFKDDITAEKIEELIKGYANLVNLVPPMKSFHWGTDVSAENLHQGFTHVFESTFESTEGVAEYVAHPAHVEFANLFISSTEKVIVIDYKPTI

SEQ ID NO: 317 - protein, 111 aa, Artificial Sequence
  altOAC58
MSSEEAKGVVKHIVIGKFKDDITPQRIEELIKAYANLVNLIPPMKSFQWGNDVSAENLHQGFTHVFESTFESTEGVAEYVAHPAHVEYANLLLPSLEKVIVIDYKPTIVKF

SEQ ID NO: 318 - protein, 111 aa, Artificial Sequence
  altOAC59
MSSEEAKGLVRHLILLKFKDGTPPAQIEQIIKNYANLVNLIEPLKSWRMGKDLSVKNLDQGFTHAFDLTFESDEGLAEYNDHPAHTKLSNQSRPHLDKFVVIDYKPTAFST

SEQ ID NO: 319 - protein, 111 aa, Artificial Sequence
  altOAC60
MSSAAGNGGVVKHLVIVQFKEGVTPERLSGLISGYAGLVDKVPSMKAFHWGTDVSIENMHQGFTHVFESTFESTEGVKEYVYHPAHIEFANDFLASTEKVLIIDFKPSAAN

SEQ ID NO: 320 - protein, 108 aa, Artificial Sequence
  altOAC61
MSSEEAKGVVKHIVLAKFKDDVTPEKIEELIKGYANLVNLVPPMKSFHWGKDVSAENLHQGFTHVFESTFESTEAIAEYVAHPAHVEFGNLLLSNLEKIIVIDYKPTS

SEQ ID NO: 321 - protein, 111 aa, Artificial Sequence
  altOAC62
MSSAEAKGIVKHIVLAKFKDEFSEQQIEEQIKGYANLVNLIPQMKSFHWGKDISAENLHQGFTHVFESTFESVEAIAEYVAHPAHVEYANLFLSSLEKVIVIDYKPTIVNL

SEQ ID NO: 322 - protein, 113 aa, Artificial Sequence
  altOAC63
MSSDAAKSQGVVKHILLAKFKDGIPQDQIDQLINGYAKLVHLIEPMKAFHWGKDVSIENMHQGFTHVFESTFESVEGIAEYISHPAHVEFANIFLPVLDKVLVVDYKPTPIQL

SEQ ID NO: 323 - protein, 115 aa, Artificial Sequence
  altOAC64
MSSAAEAGSGGVVKHILLARFKEEVPPERLDQLIRGYAGLVNLVPSMKAFHWGTDVSIENMHQGFTHVFESTFESTEGVKEYIEHPAHVEFANEFLPVLEKVLIIDYKPTAVNPS

SEQ ID NO: 324 - protein, 107 aa, Artificial Sequence
  altOAC65
MSSAEVKHIVLGKFKDGIPQEEIDQLIKQYANLVNLIQPMKSFRWGKDVSIENLHQGFTHVFESTFESCEGVAEYIAHPDHVEYASKLLPQLEKVLIIDYKPAPVQL

SEQ ID NO: 325 - protein, 106 aa, Artificial Sequence
  altOAC66
MSSAVKHIVIAKFKDEISQEKIDELIKGYANLVNLIPPMKSFHWGTDVSAENLHQGFTHVFESNFESVEAIAEYVAHPAHVEYANLFLSNLEKVIAIDYKPTIVNL

SEQ ID NO: 326 - protein, 110 aa, Artificial Sequence
  altOAC67
MSSEQVKGVVKHIVLAKFKEGVAEEEIEKHIREYANLCNLIEQMKSFEWGTDVSIENLNQGFTHIFETTFLTLEDRSAYVAHPAHVKFGTAFLHIAEKIVVIDYVPRPEQ

SEQ ID NO: 327 - protein, 115 aa, Artificial Sequence
  altOAC68
MSSEEAKGVVKHIFVAKFKDGTTPNQIDHLIREMANLVNLIEPLKSFHWGKDVSAGNKNQGFTHVLESTFESMKGVAEYIAHPAHVEYAKALLPHVEKYMVIDYKPTTLNFGLEG

SEQ ID NO: 328 - protein, 111 aa, Artificial Sequence
  altOAC69
MSSGEASGVVKHIVLAKFKDDITPQQIHELTKAYANLVNLIPPMKSFHWGKDVSAENLHQGFTHVFESTFESTEAVAEYVAHPAHVEYANLLLSKLEKVIIFDYKPTTVQL

SEQ ID NO: 329 - protein, 112 aa, Artificial Sequence
  altOAC70
MSSAAGGGSGVVKHIVLARFKEEVTPERLDQLIQGYAALVDAVPSMKSFHWGTNVSIENTHEGFTHVFESTFESTEGIKEYVKHPAHVEYANEFLSVSEKILIIDYKPTSVN

SEQ ID NO: 330 - protein, 141 aa, Artificial Sequence
  altOAC71
MSSSITETRKLFAITVFGYKRADMSEDDYHAYISKTHSGHLKALLAKNDIVSYTMQHNSSDVNKPYLEKVYGGELPAENVSDCDAVIQIVFKDIEDYLRVRTDPHFVNIVSPDHHNFADPTKTRFSMGWFEVHVSQGKVVS

SEQ ID NO: 331 - protein, 137 aa, Artificial Sequence
  altOAC72
MSSASISQRLFSVTIFGYRKPGMDEDAYHNYVSQTHAGHLKDLLVKNKIVSYHMQHNSTKARALMDRILPDIPVEKVEDADCIVQIVFRDIEDYVNVKNEEQFKSVVNPDHAVFSDPTKTKFVTGWFEFHIADGKIV

SEQ ID NO: 332 - protein, 139 aa, Artificial Sequence
  altOAC73
MSSENGHQAKQPMLCLTICAYRKGGMDEEAYRSYMTKVHAPLVQGLMVKHGIDKFSMTHNPLSTRSLMGRIFDPQFSNMADYDCIVQVQFRNIEQFVALKEDPLYKQAVFADHNKFADTNRSKMTIGWVQDFLRDGALV

SEQ ID NO: 333 - protein, 137 aa, Artificial Sequence
  altOAC74
MSSSTNSEKLFSVTIFGYRKPGMDEDFYHEYVSQTHANHLKDLLIKNKIVSYHMQHNSTKGRSLLNEIFPGIPSEKVDESDCIVQIVFRSIDDYVKVKNEEKYKSVVNPDHDVFSDASKTKFVTGWFEFHVADGEAV

SEQ ID NO: 334 - protein, 138 aa, Artificial Sequence
  altOAC75
MSSGKSQGLFSITISAKRKPGMDEDAYHKYISETHAGHLKELLVQKKIVDYTMQHNTSELMKDINLLFPNLSTINMSPSDAFVTIVFRNVQDYISVKNDPHYLSVVNPDHVNFADSSNTMMSFGWFERHVADGKLVEG

SEQ ID NO: 335 - protein, 129 aa, Artificial Sequence
  altOAC76
MSSGKSQGLFSVTISAKRKPGMDEDAYHKYISETHAGHLKHLLVEKKIVDYTMDIENLFPNLPSINRSPYDAFVTIVFRNIEDYVSVKNDPHYMSVVNPDHGNFADGPSTMMSFGWFEKHVADGKLVEG

SEQ ID NO: 336 - protein, 133 aa, Artificial Sequence
  altOAC77
MSSYAFTILGFKRDDMTEDEYHNYISTVHSAHLKALLAQNDIVSYTMQHNTSQTRDDLLNKVYQGQMPAEKVFECDAIIQVVFKTVEDYLRVREDPHFQTVVNPDHVNFAHPTKTRFVMGWHEVHVADGKVVS

SEQ ID NO: 337 - protein, 141 aa, Artificial Sequence
  altOAC78
MSSATPEIHKLYAMTIFGYKKTDMTEKDYHDYISKTHAGHLKALLAKNDIVSYTMQHNTAEVNVPMLEKIYAGRLPTGNISDCDAIIRIVFKDIQDYLRVREDPHFVSVVNPDHLNFADSQRTRLAVGWFEAHITAGKVVS

SEQ ID NO: 338 - protein, 135 aa, Artificial Sequence
  altOAC79
MSSSSSRVYCLTICACRKEGMDEDEYHRYLSEHHSNLVKGHLAAKGILSYTMTHNTTETKQMMTQIFGTYPEGDICKYDCFIQIHFKDVLDYIRAKDDPYYKEVILPDHAHFADPANTVFVTGWLETHVINGEAV

SEQ ID NO: 339 - protein, 98 aa, Artificial Sequence
  altOAC80
MSSPEDEYHRYLSEHHAVLVRNHLVKMGIVRYTLTHNTSETKEMMKRIFGDLPEGHTSDCDCLAQIMFRDVEDYVRARNDPHYKEVIFPDHANFADSS

SEQ ID NO: 340 - protein, 111 aa, Artificial Sequence
  altOAC81
MSSEEAKGVVKHVLLAKFKEGTAQDQIDQLIKDYANLVNLIEPMKSFQWGKNVSIENLHQGFTHIFESTFESTEGVAEYVAHPAHVEYANLFLANLEKVLVIDYKPTTVRV

SEQ ID NO: 341 - protein, 112 aa, Artificial Sequence
  altOAC82
MSSTIVHIVFFEWKPTTSHAQVEEACGRMLALKDQCLSATSQKPYIKSFSGGRNNSKEGHAGPFTHGFVVEFESEEDRDYYVSKDPAHQDFIKFAGELMQNVKVLDYEPGKL

SEQ ID NO: 342 - protein, 112 aa, Artificial Sequence
  altOAC83
MSSSITHIVLFEWKSTTSPEQVEEACKRMLALGEKCIHPTSQQPYIKSFTGGKNNSPEGRSDGLTHGFVVEFESAQDRDYYIHKDPAHQAFVQFAGPLAQGVKVVDYTPGQF

SEQ ID NO: 343 - protein, 106 aa, Artificial Sequence
  altOAC84
MSSFQFKDGVAAEEVQSATSRMMDLGKNCIHSTTGKPYIKSIRGGRNIAKGNRSANRTHAFVVEFDNAEDRDYYLDVDEAHSAFVEFVAPMLASPNIAVDFRNDEF

SEQ ID NO: 344 - protein, 100 aa, Artificial Sequence
  altOAC85
MSSIAHHVLFWLKADTTDEQKVAFRNGLQTLENIEVVKTFHIGVPAPIERAVVDTTYTFSLILFFEDLAAHDVYQVHPVHKAFLDEFRVYFEKVVIYDAE

SEQ ID NO: 345 - protein, 106 aa, Artificial Sequence
  altOAC86
MSSPPVYHVVLVKLKEDSTQQQIQEWRDAAAALPTAIPALQKVITGAKIPGNQFGGDWDDCIIYVIDSRDKLAEYGLHEAHQAYLKLAANIIQDRVIFDFDADNEM

SEQ ID NO: 346 - protein, 103 aa, Artificial Sequence
  altOAC87
MSSVKVTNSWTKVLVKFKPEVDESLKQEAINEILALKDKIPEIKKATAGVNFTDRSKGFTHGWVIEVESKEHLTIYNEHEHHVAFVTKFRPLLADLVAVDYES

SEQ ID NO: 347 - protein, 100 aa, Artificial Sequence
  altOAC88
MSSTNYIEHVLFLTLEPMSEEAWEDLHATFMAMKGQVPGIVDLSIGKNISPERAQGCTHALRVLLEDQKALTVYADHPAHVLFKNKLRHQRPPICLDWNI

SEQ ID NO: 348 - protein, 107 aa, Artificial Sequence
  altOAC89
MSSAIAHLVLLKFKPSISEEKAQEILKSLADLREKLPVQSVHAGTNFTHRNQGFTHAFTMIFKSKEDLETYTLAEVHQDIAKNQVHPNVDNFLAIDYEVADYSYPRI

SEQ ID NO: 349 - protein, 109 aa, Artificial Sequence
  altOAC90
MSSAIIHIVLFKLKPELSEQDGKELLMEIIELKKKVPEVETVQLGVNFNPRSKGFTHGFTMTFKNKDALETYDKSEAHVDAVKNYLSPRLEDLLIFDYEVENFSIPRPL

SEQ ID NO: 350 - protein, 102 aa, Artificial Sequence
  altOAC91
MSSGLIHIVLFKLKPTFSVQTFEQASSSLNKMSSHIPQVKHSSFGKNLTQRGKGYTHAVVVELGSMDDLPIYIDHPHHQAILKDLKEVMIIEDSIAVDYETS

SEQ ID NO: 351 - protein, 114 aa, Artificial Sequence
  altOAC92
MSSTVTHIVLLKKKPTATSESIDAFVKGITALHGVVPGVIRATAGETFTTERAQGFTHLLVVELVDRAALQMYQTHPDHVAVRDKVIVPNFEGMLAVDLDVGAPAIATGNLLDM

SEQ ID NO: 352 - protein, 109 aa, Artificial Sequence
  altOAC93
MSSVFIHIILLKFKTSVTEADAQEILSNLAHIKETLPGVIESVQLGTNFNPRAHGFTHGFTMQFRTREALDKYVKAPEHVNVAKQYVHPNIEDLLAFDYETADISSPTL

SEQ ID NO: 353 - protein, 109 aa, Artificial Sequence
  altOAC94
MSSAVAHIILLKVKPSLTEEQAHDILKAVAALKDQLPGVVESVHLGVNFAARAKGFTHGFTMVFKDKAALETYDKSPEHIKAVQEIIRPNIDDILAFDYEIEDYSIPRL

SEQ ID NO: 354 - protein, 109 aa, Artificial Sequence
  altOAC95
MSSAFIHIILLKFKESVTEQDAQEILRNLANIKNTLPGVIESVQLGVNFNHRSKGFTHGFTMVFKDRSALDTYIKAPEHVNVAKQYVHPNMEDILAFDYETADFSAPTL

SEQ ID NO: 355 - protein, 109 aa, Artificial Sequence
  altOAC96
MSSAVIHIVLFKLKSELSEQDGKDLLKAIIELKTKVPEVETVQLGVNFNPRSKGFTHGFTMTFKNKSSLDTYDKSEAHVDAVKNYLSHRIDDILIFDYEVEDFSIPRPL

SEQ ID NO: 356 - protein, 100 aa, Artificial Sequence
  altOAC97
MSSAILHTIIFKAKDDVKQEQIDKVLKALGDLGKVIPNLSNFKCGKNFSDRSKGFTHSFQVEFPNKDALQVYQVHPEHVKVRDTMLKPIADDLMCIDYEF

SEQ ID NO: 357 - protein, 100 aa, Artificial Sequence
  altOAC98
MSSTKVVHIVIVKFKPEVTEEVKQQAIRDVIALKEVIPEIINCSAGTTYTDRSKGYEHGWVVELEKEEHLPLYAEHPSHLDFVKQYKPLFADLIALDYVY

SEQ ID NO: 358 - protein, 108 aa, Artificial Sequence
  altOAC99
MSSTVQHVVLLKFKPDNTEQDGEDILKAIAGLKDKVSEIISVQLGVNKNSLSKGFTHGLTMTFKSNEDLDRYEKSEPHIKLLENYLRPRLEDILIFDYEVEEFSYPSP

SEQ ID NO: 359 - protein, 98 aa, Artificial Sequence
  altOAC100
MSSAVEHVVFLKLKQMNSEEWRTISETFHGMKNKIPGILDMSIGSNFNAERNKGFTHALRVKFQDEQSLQKYADHPLHLHFKKLLVHESDPICLDWKC

SEQ ID NO: 360 - protein, 107 aa, Artificial Sequence
  altOAC101
MSSAVIHIVLIKFKPEATTSERQALMTEMNTLRDIPCVRSLSFGENFTHRSEGYTHALVVGVETKDDVVAYMIHPIHQAFSAKLATFAESRLAVDFEDQAIPAAASI

SEQ ID NO: 361 - protein, 280 aa, Artificial Sequence
  altOAC102
MSSGHVVDESAICPASIFIDMAYTAAVFLEQENGAGAALNTYELSSLEMHSPLVLREDIEVLPQVWVEAVLDIKSNAVSVHFKGQTSKGAVGYGSATMRLGQPDSAVRRDWSRIQSLVRARVQTLNRSVRPREVHAMDTALFYKVFSEIVDYSAPYHAVQEAVIAADFHDAAVTLQLTPTADLGTFTSSPFAVDALVHVAGFLLNADVRRPKNEVHIANHIGSLRIVGDLSSPGPYHVYATIREQDQKAGTSLCDVYTTDSQDRLVAVCSDICFKKLERD

SEQ ID NO: 362 - protein, 237 aa, Artificial Sequence
  altOAC103
MSSASYIHLKALPKGRRIYALESPFLEQPELFDLSIEEMATIFLRTIRRIQPHGPYLIGGWSAGSMYAYEVAHRLTREGETIQALIILDMRAPSLIPTSIVTTDFVDKLGTFEGINRARDLPEDLSVKERAHLMATCRALSRYDAPAFPSDRQPKQVAVVWALLGLDNRPDAPIASMGRPGLDIGKSMYEMNLDEFERYFNSWFYGRRQQFGTNGWEDLLGDHIAVYTVNGDHFSMM

SEQ ID NO: 363 - protein, 171 aa, Artificial Sequence
  altOAC104
MSSQKFITGHAVLGQPLCPAPLYMELASSAILILENYKLYQDAPMLPQVQDLEIKAPLGKALDKSVALIILKADGESWLFEFSSQSPTIRRNSSQPVIHATGKILLRDTFPTSTLRTERLIPHTRLTAIQSDAKAKKLQGRQVYDRFSRAVTYSEMYKGVRDVYARDHEIV

SEQ ID NO: 364 - protein, 293 aa, Artificial Sequence
  altOAC105
MSSSKEHIFETDMTTLGPLISGHDVGGSPICPASVFHELALEAAKSVLEPGKEDILVVKGMKFSSPLIFLSSTSNTTVHVHISKKGIATTRTASFHVKSTSPASPVESLHCSGYVTLQNLEQQSGQWMRDHALVTRQARLFSGAGKDLLSTFRRRVLYENIFTRVVRYSRDYQTLQFLDVADSNLEGMGSFNMPSDSIAQTETAYIAHPVFTDTLLHAAGFIANLAIGSNEVGICSAVESIEVAYHEINYEDTFKIYCSLLEVKGLIVADSFALDSSDNIVAVIRGMEFKKLQ

SEQ ID NO: 365 - protein, 140 aa, Artificial Sequence
  altOAC106
MSSPLCLFHDGSGQISMYKRLQGHDRTTYAFFDPKFECSDEGRSFYSSIEDMAEDYASRILSTRPPLSSLILCGWSFGGIVALEVARLLFLRGIEVRGLVLIDSPSPINHEPLPAQIISSITRFTGRSESTNALEEEFLS

SEQ ID NO: 366 - protein, 343 aa, Artificial Sequence
  altOAC107
MSSLTKGSSMSAASASLQPTFLTTSAQRVVESRDDGLTATVVVHNDIADPDLNRVIQGHKVNGAALCPSSLYADSAQTLAEYLIEKYKPELKGSGLDVCNVTVPKPLIAKTGKEQFRISATANWVDKHVSVQVFSVTAEGKKLIDHAHCEVKLFDCMAADLEWKRGSYLVKRSIELLENSAVKGDAHRLRRGMVYKLFSALVDYDENYQSIREVILDSEHHEATALVKFQAPQANFHRNPYWIDSFGHLSGFIMNASDGTDSKSQVFVNHGWDSMRCLKKFSADVTYRTYVRMQPWRDSIWAGNVYIFEGDDIIAVFGGVKFQALSRKILDIALPPAGLSKAQ

SEQ ID NO: 367 - protein, 363 aa, Artificial Sequence
  altOAC108
MSSGAVVQARALRLSDSVHNVIEQVHGDKRSSITVESDMHDPSLLAIAQNHRVNGLTMAPSTLFADIAFTLAKHLIQNHGLDTHTNLPSINNMAVEKALIVGETGPQLFRASLDMDWTTMRGSVRIFSVGANGKQTTLHAVCDVAVENPSSHRESWQSNAYLIQRGIKQLVQGASDGSAHMMRRGLLYKIFSNSVQYGSAFQGIEQVWFDSEGLEGTGKVFMPSGKDTFALNPYCCDSLGHITGFIMNCSDSLDLDDHVYINHGWRTLRLVEPYQCDVQYQTYVKMQAVGSDDSTYSGDVHVLRDGKIIGICGGVTFKKVARKVLEMLLPKPSGAKAKHGVVKHVAPEPVKHVVLTPPSTTSH

SEQ ID NO: 368 - protein, 115 aa, Artificial Sequence
  altOAC109
MSSSTVTISKTDKYTFINVFTLHDPANQQKLVDIMSSLMAGPGKSVPGFISSALHRSHDGTKVVVYSQWSSKEAGESLRSIEELRPYGIQAMEISSMTPVMYEVADTFVGPDYKR

SEQ ID NO: 369 - protein, 135 aa, Artificial Sequence
  altOAC110
MSSSRFALVVVSAFVCCLVIAARPHSAAAEGKPGMVLRHIVMYKFKDDLKPEQVQEVVDTFAALPSKIDVIVGFEHGTNVSQEGKSEGFTHVFTVTFRDQAGLEKYLVHPAHLDYVKVVRDRREKVVVFDYWTKE

SEQ ID NO: 370 - protein, 101 aa, Artificial Sequence
  altOAC111
MSSIRHILLIKFKPEITQEQIEELMAMFVSMTDKVNGVTDVEWGENNSPEGKNKGYTHSVFMTFADEAGRDNYLPHPEHDALKNVFRPILDDIIVFDYQPA

SEQ ID NO: 371 - protein, 103 aa, Artificial Sequence; identical to SEQ ID NO: 261
  altOAC112

SEQ ID NO: 372 - protein, 148 aa, Artificial Sequence
  altOAC113
MSSQTNLFPTSHLNIKTIASAALLVAIVSSLVLHSSSGNLRGAEARAPEKLLRHIVLYKFKETTTPAQVQEVIDTFSALPKQILQIADFECGSNVSQEGKSEGMTQAFVVSFRSEADLQTYLTHPAHLAYVNVVKDKREKVLVFDYWK

SEQ ID NO: 373 - protein, 108 aa, Artificial Sequence; identical to SEQ ID NO: 279
  altOAC114

SEQ ID NO: 374 - protein, 111 aa, Artificial Sequence
  altOAC115
MSSAEAKGTVKHIVLAKFKDEISEQQIDELIKGYANLVNLIPQMKSFHWGKDVSAENLHQGFTHVFESTFDSVEAIEEYVAHPSHVEYANLFLSSLEKVIVVDYKPTIVNL

SEQ ID NO: 375 - protein, 114 aa, Artificial Sequence
  altOAC116
MSSEEANGVVKHIFLAKFKDDIPSKRIEELIKGFANLVNLIPPMKSFYWGRDISAENLHQGFTHIFESTFESIEGIAEYIAHPAHVEFANLLLPSLEKLIALDYKPTTVHLSLD

SEQ ID NO: 376 - protein, 111 aa, Artificial Sequence
  altOAC117
MSSEEAKGVVKHVLLAKFKDETTAEKIEELIKGYANLVNLIEPMKAFQWGKDVSIENLHQGFTHVFESTFESTEGIAEYVAHPVHVQFANLFLGHLEKVLVIDYKPTIARC

SEQ ID NO: 377 - protein, 113 aa, Artificial Sequence
  altOAC118
MSSEGAKAGGVVKHILLAKFKDEIPQYQIDQIIQGYAKLVHLIEPMKAFHWGKDVSIENLHQGFTHIFESTFESVEGIAAYVSHPAHVEFANIFLGFLEKVLVVDYKPMPVQL

SEQ ID NO: 378 - protein, 108 aa, Artificial Sequence; identical to SEQ ID NO: 316
  altOAC119

SEQ ID NO: 379 - protein, 103 aa, Cannabis sativa
  csOAC
MSSAVKHLIVLKFKDEITEAQKEEFFKTYVNLVNIIPAMKDVYWGKDVTQKNKEEGYTHIVEVTFESVETIQDYIIHPAHVGFGDVYRSFWEKLLIFDYTPRK

SEQ ID NO: 380 - protein, 389 aa, Artificial Sequence
  Maltose Binding Protein co-folding tag
MSSKIEEGKLVIWINGDKGYNGLAEVGKKFEKDTGIKVTVEHPDKLEEKFPQVAATGDGPDIIFWAHDRFGGYAQSGLLAEITPDKAFQDKLYPFTWDAVRYNGKLIAYPIAVEALSLIYNKDLLPNPPKTWEEIPALDKELKAKGKSALMFNLQEPYFTWPLIAADGGYAFKYENGKYDIKDVGVDNAGAKAGLTFLVDLIKNKHMNADTDYSIAEAAFNKGETAMTINGPWAWSNIDTSKVNYGVTVLPTFKGQPSKPFVGVLSAGINAASPNKELAKEFLENYLLTDEGLEAVNKDKPLGAVALKSYEEELAKDPRIAATMENAQKGEIMPNIPQMSAFWYAVRTAVINAASGRQTVDEALKDAQTNSSSNNNNNNNNNNLGIEGR

SEQ ID NO: 381 - protein, 241 aa, Artificial Sequence
  VEN co-folding tag
MSSVSKGEELFTGVVPILVELDGDVNGHKFSVSGEGEGDATYGKLTLKLICTTGKLPVPWPTLVTTLGYGLQCFARYPDHMKQHDFFKSAMPEGYVQERTIFFKDDGNYKTRAEVKFEGDTLVNRIELKGIDFKEDGNILGHKLEYNYNSHNVYITADKQKNGIKANFKIRHNIEDGGVQLADHYQQNTPIGDGPVLLPDNHYLSYQSALSKDPNEKRDHMVLLEFVTAAGITLGMDELYK

SEQ ID NO: 382 - protein, 119 aa, Artificial Sequence
  MST co-folding tag
MSSAMFCTFFEKHHRKWDILLEKSTGVMEAMKVTSEEKEQLSTAIDRMNEGLDAFIQLYNESEIDEPLIQLDDDTAELMKQARDMYGQEKLNEKLNTIIKQILSISVSEEGEKEGSGSG

SEQ ID NO: 383 - protein, 96 aa, Artificial Sequence
  OSP co-folding tag
MSSYLLGIGLILALIACKQNVSSLDEKNSVSVDLPGEMKVLVSKEKNKDGKYDLIATVDKLELKGTSDKNNGSGVLEGVKADKSKVKLTISDDGSG

SEQ ID NO: 384 - protein, 177 aa, Artificial Sequence
  OLE co-folding tag
MSSADRDRSGIYGGAHATYGQQQQQGGGGRPMGEQVKGMLHDKGPTASQALTVATLFPLGGLLLVLSGLALTASVVGLAVATPVFLIFSPVLVPAALLIGTAVMGFLTSGALGLGGLSSLTCLANTARQAFQRTPDYVEEAHRRMAEAAAHAGHKTAQAGQAIQGRAQEAGAGGGAG

SEQ ID NO: 385 - protein, 109 aa, Artificial Sequence
  DABB domain containing peptide (AT3G17210.1) from Arabidopsis thaliana
MEEAKGPVKHVLLASFKDGVSPEKIEELIKGYANLVNLIEPMKAFHWGKDVSIENLHQGYTHIFESTFESKEAVAEYIAHPAHVEFATIFLGSLDKVLVIDYKPTSVSL

SEQ ID NO: 386 - protein, 103 aa, Artificial Sequence
  DABB domain containing peptide (UPI000BE37309) from E. coli
MIRHVLLIHFADEASVKQIESVRKAFLSMPELVEGVTSVEWGENNSPEGKNAGYTHCVMMTFTDERARQRYLPHPKHEALKKIFRPVLKELIVFDYDCSSTME
